(19) United States
(12) Patent Application Publication
(10) Pub. No.: US 2026/0193651 A1
(43) Pub. Date: Jul. 9, 2026

(54) TREATMENT OF MTRES1 RELATED DISEASES AND DISORDERS

(71) Applicant: Empirico Inc., San Diego, CA (US)

(72) Inventors: Omri GOTTESMAN, San Diego, CA (US); Emma BRANDT, Madison, WI (US); Shannon BRUSE, Madison, WI (US); Paul BUSKE, Middleton, WI (US); Eric BUSS, Chicago, IL (US); Brian CAJES, San Diego, CA (US); David JAKUBOSKY, San Diego, CA (US); David LEWIS, Madison, WI (US); Gregory MCINNES, San Diego, CA (US); David ROZEMA, Cross Plains, WI (US); John VEKICH, San Diego, CA (US); Darren H. WAKEFIELD, Fitchburg, WI (US)

(21) Appl. No.: 19/132,713

(22) PCT Filed: Nov. 30, 2023
(86) PCT No.: PCT/US2023/081931

§ 371 Date: May 23, 2025

Related U.S. Application Data
(60) Provisional application No. 63/429,763, filed on Dec. 2, 2022.
(60) Provisional application No. 63/432,854, filed on Dec. 15, 2022.
(60) Provisional application No. 63/582,781, filed on Sep. 14, 2023.
(60) Provisional application No. 63/540,624, filed on Sep. 26, 2023.

(51) Int. Cl. C12N 15/113; A61P 25/28; C12Q 1/6883

(52) U.S. Cl. CPC C12N 15/113; A61P 25/28; C12Q 1/6883; C12N 2310/11; C12N 2310/14; C12N 2310/315; C12N 2310/321; C12N 2310/322; C12N 2310/3231; C12N 2310/3515; C12N 2320/32; C12Q 2600/118; C12Q 2600/156

(57) ABSTRACT

Disclosed herein are compositions comprising an oligonucleotide that targets MTRES1. The oligonucleotide may include a small interfering RNA (siRNA) or an antisense oligonucleotide (ASO). Also provided herein are methods of treating conditions associated with MTRES1 gene mutations that include providing an oligonucleotide that targets MTRES1 in a subject.

### CROSS-REFERENCE

[0001] This application claims the benefit of U.S. Provisional Application No. 63/429,763, filed on Dec. 2, 2022, U.S. Provisional Application No. 63/432,854, filed on Dec. 15, 2022, U.S. Provisional Application No. 63/582,781, filed on Sep. 14, 2023, U.S. Provisional Application No. 63/540,624, filed on Sep. 26, 2023, which applications are incorporated herein by reference.

### INCORPORATION BY REFERENCE OF SEQUENCE LISTING

[0002] The present application is being filed along with a Sequence Listing in electronic format. The Sequence Listing is provided as a file entitled 54462-743_601_SL.xml, created Nov. 30, 2023, which is 8,590,920 bytes in size. The information in the electronic format of the Sequence Listing is incorporated by reference in its entirety.

### BACKGROUND

[0003] Neurological disorders are a common problem, particularly in the older population. Improved therapeutics are needed for treating these disorders.

### SUMMARY

[0004] In certain aspects, described herein is a composition comprising an oligonucleotide that targets MTRES1 and when administered to a subject in an effective amount decreases central nervous system (CNS) MTRES1, wherein the oligonucleotide comprises any one of SEQ ID NOS: 2675, 2677-2686, 2689, 2720, 2729, 2739, 2745, 2748, 2749, 2754, 2758-2762, 2766, 2767, 2769, 2770, 2786, 2787-2812, 2814-2816, 2819-2822, 2824, 2828-2833, 2836, 2838, 2839, 2857, 2859-2868, 2871, 2873, 2874, 2877-2879, 2940-2944, 2948-2952, 2968-2994, 2996-2998, 3001-3004, 3006, 3010, 3011, 3013-3015, 3018, or 3020. In some embodiments, the oligonucleotide comprises a modified internucleoside linkage. In some embodiments, the modified internucleoside linkage comprises alkylphosphonate, phosphorothioate, methylphosphonate, phosphorodithioate, alkylphosphonothioate, phosphoramidate, carbamate, carbonate, phosphate triester, acetamidate, or carboxymethyl ester, or a combination thereof. In some embodiments, the modified internucleoside linkage comprises one or more phosphorothioate linkages. In some embodiments, the oligonucleotide comprises 1, 2, 3, 4, 5, 6, 7, 8, 9, 10, 11, 12, 13, 14, 15, 16, 17, 18, 19, or 20 modified internucleoside linkages. In some embodiments, the oligonucleotide comprises a modified nucleoside. In some embodiments, the modified nucleoside comprises a locked nucleic acid (LNA), hexitol nucleic acid (HNA), cyclohexene nucleic acid (CeNA), 2′-O-methoxyethyl, 2′-O-alkyl, 2′-O-allyl, 2′-O-allyl, 2′-fluoro, 2′-deoxy, or 2′-O-methyl inosine, or a combination thereof. In some embodiments, the modified nucleoside comprises an LNA. In some embodiments, the modified nucleoside comprises a 2′,4′ constrained ethyl nucleic acid. In some embodiments, the modified nucleoside comprises a 2′-O-methyl nucleoside, 2′-deoxyfluoro nucleoside, 2′-O—N-methylacetamido (2′-O-NMA) nucleoside, a 2′-O-dimethylaminoethoxyethyl(2′-O-DMAEOE) nucleoside, 2′-O-aminopropyl (2′-O-AP) nucleoside, or 2′-ara-F, or a combination thereof. In some embodiments, the modified nucleoside comprises one or more 2′-fluoro modified nucleosides. In some embodiments, the modified nucleoside comprises a 2′-O-alkyl modified nucleoside. In some embodiments, the oligonucleotide comprises 1, 2, 3, 4, 5, 6, 7, 8, 9, 10, 11, 12, 13, 14, 15, 16, 17, 18, 19, 20, or 21 modified nucleosides. In some embodiments, the oligonucleotide comprises a lipophilic moiety attached at a 3′ or 5′ terminus of the oligonucleotide. In some embodiments, the lipophilic moiety comprises cholesterol, retinoic acid, cholic acid, adamantane acetic acid, 1-pyrene butyric acid, dihydrotestosterone, 1,3-bis-O(hexadecyl)glycerol, geranyloxyhexyanol, hexadecylglycerol, borneol, menthol, 1,3-propanediol, heptadecyl, palmitic acid, myristic acid, O3-(oleoyl) lithocholic acid, O3-(oleoyl) cholenic acid, ibuprofen, naproxen, dimethoxytrityl, or phenoxazine. In some embodiments, the lipophilic moiety comprises a C₄-C₃₀ hydrocarbon chain. In some embodiments, the lipophilic moiety comprises a lipid. In some embodiments, the lipid comprises myristoyl, palmitoyl, stearoyl, lithocholoyl, docosanoyl, docosahexaenoyl, myristyl, palmityl stearyl, α-tocopherol, or a combination thereof. In some embodiments, the oligonucleotide comprises a small interfering RNA (siRNA) comprising a sense strand and an antisense strand. In some embodiments, the sense strand is 12-30 nucleosides in length. In some embodiments, the antisense strand is 12-30 nucleosides in length.

[0005] In certain aspects, described herein is a composition comprising an oligonucleotide that inhibits the expression of MTRES1, wherein the oligonucleotide comprises an siRNA comprising a sense strand and an antisense strand, each strand is independently about 12-30 nucleosides in length, and at least one of the sense strand and the antisense strand comprises a nucleoside sequence comprising about 12-30 contiguous nucleosides of SEQ ID NOS: 2675, 2677-2686, 2689, 2720, 2729, 2739, 2745, 2748, 2749, 2754, 2758-2762, 2766, 2767, 2769, 2770, 2786, 2787-2812, 2814-2816, 2819-2822, 2824, 2828-2833, 2836, 2838, 2839, 2857, 2859-2868, 2871, 2873, 2874, 2877-2879, 2940-2944, 2948-2952, 2968-2994, 2996-2998, 3001-3004, 3006, 3010, 3011, 3013-3015, 3018, or 3020. In some embodiments, any one of the following is true with regard to the sense strand: all purines comprise 2′-fluoro modified purines, and all pyrimidines comprise a mixture of 2′-fluoro and 2′-methyl modified pyrimidines; all purines comprise 2′-methyl modified purines, and all pyrimidines comprise a mixture of 2′-fluoro and 2′-methyl modified pyrimidines; all purines comprise 2′-fluoro modified purines, and all pyrimidines comprise 2′-methyl modified pyrimidines; all pyrimidines comprise 2′-fluoro modified pyrimidines, and all purines comprise a mixture of 2′-fluoro and 2′-methyl modified purines; all pyrimidines comprise 2′-methyl modified pyrimidines, and all purines comprise a mixture of 2′-fluoro and 2′-methyl modified purines; or all pyrimidines comprise 2′-fluoro modified pyrimidines, and all purines comprise 2′-methyl modified purines. In some embodiments, any one of the following is true with regard to the sense strand: (a) all purines comprise 2′-fluoro modified purines and all pyrimidines comprise (i) a mixture of 2′-O-methyl and 2′-O-methoxyethyl modified pyrimidines; or (ii) a mixture of 2′-fluoro, 2′-O-methyl, and 2′-O-methoxyethyl modified pyrimidines; (b) all purines comprise 2′-O-methyl modified purines and all pyrimidines comprise (i) a mixture of 2′-fluoro and 2′-O-methoxyethyl modified pyrimidines; or (ii) a mixture of 2′-fluoro, 2′-O-methyl, and 2′-O-methoxyethyl modified pyrimidines; (c) all purines comprise 2′-O-methoxyethyl modified purines and all pyrimidines comprise (i) a mixture of 2′-fluoro and 2′-O-methyl modified pyrimidines; or (ii) a mixture of 2′-fluoro, 2′-O-methyl, and 2′-O-methoxyethyl modified pyrimidines; (d) all purines comprise a mixture of 2′-fluoro and 2′-O-methyl modified purines and all pyrimidines comprise (i) 2′-O-methoxyethyl modified pyrimidines; (ii) a mixture of 2′-O-methyl and 2′-O-methoxyethyl modified pyrimidines; (iii) a mixture of 2′-fluoro and 2′-O-methoxyethyl modified pyrimidines; or (iv) a mixture of 2′-fluoro, 2′-O-methyl, and 2′-O-methoxyethyl modified pyrimidines; (e) all purines comprise a mixture of 2′-fluoro and 2′-O-methoxyethyl modified purines and all pyrimidines comprise (i) 2′-O-methyl modified pyrimidines; (ii) a mixture of 2′-fluoro and 2′-O-methyl modified pyrimidines; (iii) a mixture of 2′-O-methyl and 2′-O-methoxyethyl modified pyrimidines; or (iv) a mixture of 2′-fluoro, 2′-O-methyl, and 2′-O-methoxyethyl modified pyrimidines; (f) all purines comprise a mixture of 2′-O-methyl and 2′-O-methoxyethyl modified purines and all pyrimidines comprise (i) 2′-fluoro modified pyrimidines; (ii) a mixture of 2′-fluoro and 2′-O-methyl modified pyrimidines; (iii) a mixture of 2′-fluoro and 2′-O-methoxyethyl modified pyrimidines; or (iv) a mixture of 2′-fluoro, 2′-O-methyl, and 2′-O-methoxyethyl modified pyrimidines; or (g) all purines comprise a mixture of 2′-fluoro, 2′-O-methyl, and 2′-O-methoxyethyl modified purines and all pyrimidines comprise (i) 2′-fluoro modified pyrimidines; (ii) 2′-O-methyl modified pyrimidines; (iii) 2′-O-methoxyethyl modified pyrimidines; (iv) a mixture of 2′-fluoro and 2′-O-methyl modified pyrimidines; (v) a mixture of 2′-O-methyl and 2′-O-methoxyethyl modified pyrimidines; (vi) a mixture of 2′-fluoro and 2′-O-methoxyethyl modified pyrimidines; or (vii) a mixture of 2′-fluoro, 2′-O-methyl, and 2′-O-methoxyethyl modified pyrimidines; and with the proviso that in any of the foregoing, the sense strand may include a 2′-deoxy nucleoside. In some embodiments, any one of the following is true with regard to the antisense strand: all purines comprise 2′-fluoro modified purines, and all pyrimidines comprise a mixture of 2′-fluoro and 2′-methyl modified pyrimidines; all purines comprise 2′-methyl modified purines, and all pyrimidines comprise a mixture of 2′-fluoro and 2′-methyl modified pyrimidines; all purines comprise 2′-methyl modified purines, and all pyrimidines comprise 2′-fluoro modified pyrimidines; all pyrimidines comprise 2′-fluoro modified pyrimidines, and all purines comprise a mixture of 2′-fluoro and 2′-methyl modified purines; all pyrimidines comprise 2′-methyl modified pyrimidines, and all purines comprise a mixture of 2′-fluoro and 2′-methyl modified purines; or all pyrimidines comprise 2′-methyl modified pyrimidines, and all purines comprise 2′-fluoro modified purines. In some embodiments, the oligonucleotide comprises a phosphate at the 5′ end of the antisense strand. In some embodiments, the oligonucleotide comprises a phosphate mimic at the 5′ end of the antisense strand. In some embodiments, the phosphate mimic comprises a 5′-vinyl phosphonate (VP). In some embodiments, the oligonucleotide comprises an antisense oligonucleotide (ASO). In some embodiments, the ASO is 12-30 nucleosides in length.

[0006] In certain aspects, described herein is a composition comprising: a small interfering RNA (siRNA) comprising a sense strand, an antisense strand complementary to a section of an MTRES1 mRNA, and a lipid moiety connected to an end of the sense or antisense strand; wherein the lipid moiety comprises (a) a phenyl or cyclohexanyl linker, and (b) a lipid, wherein the linker is connected to the lipid and to the end of the sense or antisense strand. In some embodiments, the lipid and the end of the sense or antisense strand are connected to the phenyl or cyclohexanyl linker in the 1,4; 1,3; or 1,2 substitution pattern. In some embodiments, the lipid and the end of the sense or antisense strand are connected to the phenyl or cyclohexanyl linker in the 1,4-substitution pattern. In some embodiments, the lipid moiety comprises the following structure:

[chemical structure]

wherein the dotted line indicates a covalent connection to the end of the sense or antisense strand, with the proviso that R is not an octane. In some embodiments, the lipid moiety comprises the following structure:

[chemical structure]

wherein the dotted line indicates a covalent connection to the end of the sense or antisense strand, n is 1-3, and R is an alkyl group containing 4-18 carbons. In some embodiments, the lipid moiety comprises the following structure:

[chemical structure]

wherein the dotted line indicates a covalent connection to the end of the sense or antisense strand, n is 0-3, and R is an alkyl group containing 4-18 carbons. In some embodiments, the lipid moiety comprises the following structure:

[chemical structure]

wherein the dotted line indicates a covalent connection to the end of the sense or antisense strand. In some embodiments, the lipid moiety comprises a lipid moiety depicted in Table 1.

[0007] In certain aspects, described herein is a composition comprising an siRNA that targets MTRES1 and when administered to a cell modulates the expression of MTRES1, wherein the siRNA comprises a sense strand and an antisense strand; and wherein the sense strand or the antisense strand comprises any of modification patterns 33S to 65S or 11AS to 40AS. In some embodiments, the oligonucleotide comprises any one of SEQ ID NOS: 1-2280, 2550-3037, 3263-3266, 3281-3295, or 3338. In some embodiments, the oligonucleotide comprises any one of SEQ ID NOS: 2675, 2677-2686, 2689, 2720, 2729, 2739, 2745, 2748, 2749, 2754, 2758-2762, 2766, 2767, 2769, 2770, 2786, 2787-2812, 2814-2816, 2819-2822, 2824, 2828-2833, 2836, 2838, 2839, 2857, 2859-2868, 2871, 2873, 2874, 2877-2879, 2940-2944, 2948-2952, 2968-2994, 2996-2998, 3001-3004, 3006, 3010, 3011, 3013-3015, 3018, or 3020.

[0008] In certain aspects, described herein is a composition comprising an siRNA that targets MTRES1 and when administered to a cell modulates the expression of MTRES1, wherein the siRNA comprises a sense strand and an antisense strand; and wherein the sense strand comprises any one of SEQ ID NOs: 3038-3124, 3239, 3241-3242, 3259-3260, 3267-3273, 3296-3299, or 3305-3318 or the antisense strand comprises any one of SEQ ID NOs: 3125-3212, 3243-3250, 3261-3262, 3274-3280, 3300-3304, or 3319-3337. In some embodiments, the method further comprises a pharmaceutically acceptable carrier. In some embodiments, the composition is formulated for administration to a central nervous system. In some embodiments, the composition is formulated for delivery to a neural cell. In some embodiments, described herein is a method of treating a subject having a neurological disorder, the method comprising administering an effective amount of the composition described herein to the subject. In some embodiments, the composition is administered intrathecally. In some embodiments, described herein is a method of treating a subject having a neurological disorder or who is at risk for developing the neurological disorder, the method comprising evaluating a subject's risk for developing a neurological disorder and administering an effective amount of the composition described herein to the subject. In some embodiments, the subject has a genotype at risk for developing Alzheimer's disease or dementia. In some embodiments, the subject is a heterozygous or homozygous carrier of APOE4. In some embodiments, the subject is a heterozygous or homozygous carrier of MTRES1 rs117058816-G (c.3+1G). In some embodiments, evaluating a subject's risk for developing a neurological disorder comprises calculating a polygenic risk score for developing Alzheimer's disease or dementia. In some embodiments, the subject has a polygenic risk score in the 40th percentile or higher, which is indicative of a high risk for developing Alzheimer's disease or dementia. In some embodiments, the subject has a polygenic risk score in the 20th percentile or higher, which is indicative of a high risk for developing Alzheimer's disease or dementia. In some embodiments, calculating a polygenic risk score comprises providing genomic data comprising one or more genotypes of the subject, wherein the one or more genotypes is associated with a high risk for developing Alzheimer's disease or dementia.

### BRIEF DESCRIPTION OF THE DRAWINGS

[0009] FIG. 1A is an image of a western blot of MTRES1 protein in the wildtype and MTRES1 c.3+1G>A minigene expression constructs. Lane 1: ladder showing bands for 17, 24, 31, and 38 kDa; lane 2: Empty vector; lane 3: wild type (WT); lane 4: c.3+1G>A.

[0010] FIG. 1B is a plot quantifying MTRES1 western blot data in the wildtype (left) and MTRES1 c.3+1G>A minigene (right) expression constructs. The y-axis is labeled normalized to total protein from 0 to 4 at 1 unit intervals.

[0011] FIG. 2 is a plot of MTRES1 mRNA qPCR data in the wildtype (left) and MTRES1 c.3+1G>A minigene (right) expression constructs. The y-axis is labeled fold change from empty vector from 0 to 100 at 20 unit intervals.

[0012] FIG. 3 is an image of a western blot of MTRES1 protein in the CRISPR-engineered wildtype, MTRES1 c.3+1G>A knock-in cells, and MTRES1 knock-out cell lines. The left column is labeled whole cell lysate, and the right column is labeled mito fraction. The top row is labeled WT (wild type), the middle row is labeled c.3+1G>A, and the bottom row is labeled KO (knockout).

[0013] FIG. 4 is a plot of MTRES1 mRNA qPCR data in the CRISPR-engineered wildtype (left), MTRES1 c.3+1G>A knock-in cells (middle), and MTRES1 knock-out cell lines (right). The y-axis is labeled fold change from 0.0 to 1.5 at 0.5 unit intervals.

### DETAILED DESCRIPTION

[0014] Large-scale human genetic data can improve the success rate of pharmaceutical discovery and development. A Genome Wide Association Study (GWAS) may detect associations between genetic variants and traits in a population sample. A GWAS may enable better understanding of the biology of disease and provide applicable treatments. A GWAS can utilize genotyping and/or sequencing data, and often involves an evaluation of millions of genetic variants that are relatively evenly distributed across the genome. The most common GWAS design is the case-control study, which involves comparing variant frequencies in cases versus controls. If a variant has a significantly different frequency in cases versus controls, that variant is said to be associated with disease. Association statistics that may be used in a GWAS are p-values, as a measure of statistical significance; odds ratios (OR), as a measure of effect size; or beta coefficients (beta), as a measure of effect size. Researchers often assume an additive genetic model and calculate an allelic odds ratio, which is the increased (or decreased) risk of disease conferred by each additional copy of an allele (compared to carrying no copies of that allele). An additional concept in design and interpretation of GWAS is that of linkage disequilibrium, which is the non-random association of alleles. The presence of linkage disequilibrium can obfuscate which variant is “causal.”

[0015] Functional annotation of variants and/or wet lab experimentation can identify the causal genetic variant identified via GWAS, and in many cases may lead to the identification of disease-causing genes. In particular, understanding the functional effect of a causal genetic variant (for example, loss of protein function, gain of protein function, increase in gene expression, or decrease in gene expression) may allow that variant to be used as a proxy for therapeutic modulation of the target gene, or to gain insight into potential therapeutic efficacy and safety of a therapeutic that modulates that target.

[0016] Identification of such gene-disease associations has provided insights into disease biology and may be used to identify novel therapeutic targets for the pharmaceutical industry. In order to translate the therapeutic insights derived from human genetics, disease biology in patients may be exogenously ‘programmed’ into replicating the observation from human genetics. There are several potential options for therapeutic modalities that may be brought to bear in translating therapeutic targets identified via human genetics into novel medicines. These may include well established therapeutic modalities such as small molecules and monoclonal antibodies, maturing modalities such as oligonucleotides, and emerging modalities such as gene therapy and gene editing. The choice of therapeutic modality can depend on several factors including the location of a target (for example, intracellular, extracellular, or secreted), a relevant tissue (for example, brain) and a relevant indication.

[0017] The MTRES1 gene is located on chromosome 6 and encodes mitochondrial transcription rescue factor 1 (MTRES1), also known as chromosome 6 open reading frame 203 (C6orf203). The MTRES1 gene may also be referred to as the C6orf203 gene. MTRES1 may include 240 amino acids. MTRES1 may include 245 amino acids. MTRES1 may be expressed in neural cells. MTRES1 may be cytoplasmic or intracellular. MTRES1 may be localized in mitochondria within the cell. MTRES1 may be involved in mitochondrial transcription regulation. MTRES1 may be involved in mitochondrial translation regulation. An example of a MTRES1 amino acid sequence, and further description of MTRES1 is included at uniprot.org under accession no. Q9POP8 (last modified Oct. 1, 2000).

[0018] MTRES1 RNA expression is often higher in mitochondria-rich tissues such as skeletal muscle, heart, liver, kidney, adrenal cortex, and brain. MTRES1 RNA may be expressed throughout the brain, with an average expression of 24 nTPM across all regions. Expression is generally higher within the cerebral cortex (nTPM=35.7), with highest expression within int prefrontal cortex. Within the prefrontal cortex, highest expression may be in the dorsomedial and dorsolateral regions. MTRES1 protein may also be detectable in the cortex, cerebellum, hippocampus and caudate, particularly within neuronal cells. Within neuronal cells, MTRES1 was found to have the highest levels of expression in astrocytes, neurons, and oligodendrocytes, with lower but measurable expression in microglia, endothelial cells, and fetal astrocytes.

[0019] Here it is shown that loss-of-function MTRES1 variants may protect against neurological diseases. For example, a loss-of-function MTRES1 variant was associated with protective associations against Alzheimer's disease, family history of Alzheimer's disease, dementia, vascular dementia, anticholinesterase medication use, and delirium. Therefore, inhibition of MTRES1 may serve as a therapeutic for treatment of a neurological disorder such as dementia, Alzheimer's disease, delirium, cognitive decline, vascular dementia, or Parkinson's disease.

[0020] Disclosed herein are compositions comprising an oligonucleotide that targets MTRES1. Where inhibition or targeting of MTRES1 is disclosed, it is contemplated that some embodiments may include inhibiting or targeting a MTRES1 protein or MTRES1 RNA. For example, by inhibiting or targeting an RNA (e.g. mRNA) encoded by the MTRES1 gene using an oligonucleotide described herein, the MTRES1 protein may be inhibited or targeted as a result of there being less production of the MTRES1 protein by translation of the MTRES1 RNA; or a MTRES1 protein may be targeted or inhibited by an oligonucleotide that binds or interacts with a MTRES1 RNA and reduces production of the MTRES1 protein from the MTRES1 RNA. Thus, targeting MTRES1 may refer to binding a MTRES1 RNA and reducing MTRES1 RNA or protein levels. The oligonucleotide may include a small interfering RNA (siRNA) or an antisense oligonucleotide (ASO). Also provided herein are methods of treating a neurological disorder by providing an oligonucleotide that targets MTRES1 to a subject in need thereof.

[0021] In some embodiments, the siRNAs described herein comprise a sense strand and an antisense strand. In some embodiments, the sense strand comprises any one of SEQ ID NOs: 3038-3124, 3239, 3241-3242, 3259-3260, 3267-3273, 3296-3299, or 3305-3318 or the antisense strand comprises any one of SEQ ID NOs: 3125-3212, 3243-3250, 3261-3262, 3274-3280, 3300-3304, or 3319-3337. In some embodiments, the sense strand or the antisense strand comprise any one of SEQ ID NOS: 2675, 2677-2686, 2689, 2720, 2729, 2739, 2745, 2748, 2749, 2754, 2758-2762, 2766, 2767, 2769, 2770, 2786, 2787-2812, 2814-2816, 2819-2822, 2824, 2828-2833, 2836, 2838, 2839, 2857, 2859-2868, 2871, 2873, 2874, 2877-2879, 2940-2944, 2948-2952, 2968-2994, 2996-2998, 3001-3004, 3006, 3010, 3011, 3013-3015, 3018, or 3020. In some embodiments, the sense strand or the antisense strand comprises any of modification patterns 33S to 65S or 11AS to 39AS.

[0022] In certain aspects, disclosed herein is a method of treating a subject having a neurological disorder, comprising administering an effective amount of the siRNAs disclosed herein to the subject. In some embodiments, disclosed herein is a method of treating a subject having a neurological disorder or who is at risk for developing the neurological disorder, the method comprising evaluating a subject's risk for developing a neurological disorder and administering an effective amount of the siRNAs disclosed herein to the subject. In some embodiments, the subject has a genotype at risk for developing Alzheimer's disease or dementia. In some embodiments, the subject is a heterozygous or homozygous carrier of APOE4. In some embodiments, the subject is a heterozygous or homozygous carrier of MTRES1 rs117058816-G (c.3+1G). In some embodiments, evaluating a subject's risk for developing a neurological disorder comprises calculating a polygenic risk score for developing Alzheimer's disease or dementia. In some embodiments, the subject has a polygenic risk score in the 40^{th} percentile or higher, which is indicative of a high risk for developing Alzheimer's disease or dementia. In some embodiments, the subject has a polygenic risk score in the 20^{th} percentile or higher, which is indicative of a high risk for developing Alzheimer's disease or dementia. In some embodiments, calculating a polygenic risk score comprises providing genomic data comprising one or more genotypes of the subject, wherein the one or more genotypes is associated with a high risk for developing Alzheimer's disease or dementia.

### I. COMPOSITIONS

[0023] Disclosed herein, in some embodiments, are compositions comprising an oligonucleotide. In some embodiments, the composition comprises an oligonucleotide that targets MTRES1. In some embodiments, the composition consists of an oligonucleotide that targets MTRES1. In some embodiments, the oligonucleotide reduces MTRES1 mRNA expression in the subject. In some embodiments, the oligonucleotide reduces MTRES1 protein expression in the subject. The oligonucleotide may include a small interfering RNA (siRNA) described herein. The oligonucleotide may include an antisense oligonucleotide (ASO) described herein. In some embodiments, a composition described herein is used in a method of treating a disorder in a subject in need thereof. Some embodiments relate to a composition comprising an oligonucleotide for use in a method of treating a disorder as described herein. Some embodiments relate to use of a composition comprising an oligonucleotide, in a method of treating a disorder as described herein. In some embodiments, an oligonucleotide modulates MTRES1 mRNA or protein levels.

[0024] Some embodiments include a composition comprising an oligonucleotide that targets MTRES1 and when administered to a subject in an effective amount decreases MTRES1 mRNA or protein levels in a cell, fluid or tissue. In some embodiments, the composition comprises an oligonucleotide that targets MTRES1 and when administered to a subject in an effective amount decreases MTRES1 mRNA levels in a cell or tissue. In some embodiments, the cell is a neural cell such as a central nervous system (CNS) cell. Some examples of CNS cells include neurons, glia, microglia, astrocytes, or oligodendrocytes. In some embodiments, the tissue is CNS or brain tissue. In some embodiments, the MTRES1 mRNA levels are decreased by about 2.5% or more, about 5% or more, or about 7.5% or more, as compared to prior to administration. In some embodiments, the MTRES1 mRNA levels are decreased by about 10% or more, as compared to prior to administration. In some embodiments, the MTRES1 mRNA levels are decreased by about 20% or more, about 30% or more, about 40% or more, about 50% or more, about 60% or more, about 70% or more, about 80% or more, about 90% or more, or about 100%, as compared to prior to administration. In some embodiments, the MTRES1 mRNA levels are decreased by no more than about 2.5%, no more than about 5%, or no more than about 7.5%, as compared to prior to administration. In some embodiments, the MTRES1 mRNA levels are decreased by no more than about 10%, as compared to prior to administration. In some embodiments, the MTRES1 mRNA levels are decreased by no more than about 20%, no more than about 30%, no more than about 40%, no more than about 50%, no more than about 60%, no more than about 70%, no more than about 80%, or no more than about 90%, as compared to prior to administration. In some embodiments, the MTRES1 mRNA levels are decreased by 2.5%, 5%, 7.5%, 10%, 15%, 20%, 25%, 30%, 35%, 40%, 45%, 50%, 55%, 60%, 65%, 70%, 75%, 80%, 85%, 90%, 95%, or 100%, or by a range defined by any of the two aforementioned percentages.

[0025] In some embodiments, the composition comprises an oligonucleotide that targets MTRES1 and when administered to a subject in an effective amount decreases MTRES1 protein levels in a cell, fluid or tissue. In some embodiments, the cell is a neural cell such as a central nervous system (CNS) cell. Some examples of CNS cells include neurons, glia, microglia, astrocytes, or oligodendrocytes. In some embodiments, the tissue is CNS or brain tissue. In some embodiments, the MTRES1 protein levels are decreased by about 2.5% or more, about 5% or more, or about 7.5% or more, as compared to prior to administration. In some embodiments, the MTRES1 protein levels are decreased by about 10% or more, as compared to prior to administration. In some embodiments, the MTRES1 protein levels are decreased by about 20% or more, about 30% or more, about 40% or more, about 50% or more, about 60% or more, about 70% or more, about 80% or more, about 90% or more, or about 100%, as compared to prior to administration. In some embodiments, the MTRES1 protein levels are decreased by no more than about 2.5%, no more than about 5%, or no more than about 7.5%, as compared to prior to administration. In some embodiments, the MTRES1 protein levels are decreased by no more than about 10%, as compared to prior to administration. In some embodiments, the MTRES1 protein levels are decreased by no more than about 20%, no more than about 30%, no more than about 40%, no more than about 50%, no more than about 60%, no more than about 70%, no more than about 80%, or no more than about 90%, as compared to prior to administration. In some embodiments, the MTRES1 protein levels are decreased by 2.5%, 5%, 7.5%, 10%, 15%, 20%, 25%, 30%, 35%, 40%, 45%, 50%, 55%, 60%, 65%, 70%, 75%, 80%, 85%, 90%, 95%, or 100%, or by a range defined by any of the two aforementioned percentages.

[0026] In some embodiments, the composition comprises an oligonucleotide that targets MTRES1 and when administered to a subject in an effective amount diminishes a neurological disorder phenotype. The neurological disorder disease may include dementia, Alzheimer's disease, delirium, cognitive decline, vascular dementia, or Parkinson's disease. In some embodiments, the neurological disorder phenotype is decreased by about 2.5% or more, about 5% or more, or about 7.5% or more, as compared to prior to administration. In some embodiments, the neurological disorder phenotype is decreased by about 10% or more, as compared to prior to administration. In some embodiments, the neurological disorder phenotype is decreased by about 20% or more, about 30% or more, about 40% or more, about 50% or more, about 60% or more, about 70% or more, about 80% or more, about 90% or more, or about 100%, as compared to prior to administration. In some embodiments, the neurological disorder phenotype is decreased by no more than about 2.5%, no more than about 5%, or no more than about 7.5%, as compared to prior to administration. In some embodiments, the neurological disorder phenotype is decreased by no more than about 10%, as compared to prior to administration. In some embodiments, the neurological disorder phenotype is decreased by no more than about 20%, no more than about 30%, no more than about 40%, no more than about 50%, no more than about 60%, no more than about 70%, no more than about 80%, or no more than about 90%, as compared to prior to administration. In some embodiments, the neurological disorder phenotype is decreased by 2.5%, 5%, 7.5%, 10%, 15%, 20%, 25%, 30%, 35%, 40%, 45%, 50%, 55%, 60%, 65%, 70%, 75%, 80%, 85%, 90%, 95%, or 100%, or by a range defined by any of the two aforementioned percentages.

[0027] In some embodiments, the composition comprises an oligonucleotide that targets MTRES1 and when administered to a subject in an effective amount enhances a protective phenotype against a neurological disorder in the subject. The neurological disorder may include dementia, Alzheimer's disease, delirium, cognitive decline, vascular dementia, or Parkinson's disease. In some embodiments, the protective phenotype is increased by about 2.5% or more, about 5% or more, or about 7.5% or more, as compared to prior to administration. In some embodiments, the protective phenotype is increased by about 10% or more, as compared to prior to administration. In some embodiments, the protective phenotype is increased by about 20% or more, about 30% or more, about 40% or more, about 50% or more, about 60% or more, about 70% or more, about 80% or more, about 90% or more, or about 100% or more, as compared to prior to administration. In some embodiments, the protective phenotype is increased by about 200% or more, about 300% or more, about 400% or more, about 500% or more, about 600% or more, about 700% or more, about 800% or more, about 900% or more, or about 1000% or more, as compared to prior to administration. In some embodiments, the protective phenotype is increased by no more than about 2.5%, no more than about 5%, or no more than about 7.5%, as compared to prior to administration. In some embodiments, the protective phenotype is increased by no more than about 10%, as compared to prior to administration. In some embodiments, the protective phenotype is increased by no more than about 20%, no more than about 30%, no more than about 40%, no more than about 50%, no more than about 60%, no more than about 70%, no more than about 80%, no more than about 90%, or no more than about 100%, as compared to prior to administration. In some embodiments, the protective phenotype is increased by no more than about 200%, no more than about 300%, no more than about 400%, no more than about 500%, no more than about 600%, no more than about 700%, no more than about 800%, no more than about 900%, or no more than about 1000%, as compared to prior to administration. In some embodiments, the protective phenotype is increased by 2.5%, 5%, 7.5%, 10%, 15%, 20%, 25%, 30%, 35%, 40%, 45%, 50%, 55%, 60%, 65%, 70%, 75%, 80%, 85%, 90%, 95%, 100%, 150%, 200%, 250%, 300%, 400%, 500%, 600%, 700%, 800%, 900%, or 1000%, or by a range defined by any of the two aforementioned percentages.

[0028] In some embodiments, the composition comprises an oligonucleotide that targets MTRES1 and when administered to a subject in an effective amount decreases a marker of neurodegeneration in the subject. Some example markers of neurodegeneration may include central nervous system (CNS) amyloid plaques, CNS tau accumulation, cerebrospinal fluid (CSF) beta-amyloid 42, CSF tau, CSF phospho-tau, CSF or plasma neurofilament light chain (NfL), Lewy bodies, or CSF alpha-synuclein. In some embodiments, the marker of neurodegeneration is decreased by about 2.5% or more, about 5% or more, or about 7.5% or more, as compared to prior to administration. In some embodiments, the marker of neurodegeneration is decreased by about 10% or more, as compared to prior to administration. In some embodiments, the marker of neurodegeneration is decreased by about 20% or more, about 30% or more, about 40% or more, about 50% or more, about 60% or more, about 70% or more, about 80% or more, about 90% or more, or about 100%, as compared to prior to administration. In some embodiments, the marker of neurodegeneration is decreased by no more than about 2.5%, no more than about 5%, or no more than about 7.5%, as compared to prior to administration. In some embodiments, the marker of neurodegeneration is decreased by no more than about 10%, as compared to prior to administration. In some embodiments, the marker of neurodegeneration is decreased by no more than about 20%, no more than about 30%, no more than about 40%, no more than about 50%, no more than about 60%, no more than about 70%, no more than about 80%, or no more than about 90%, as compared to prior to administration. In some embodiments, the marker of neurodegeneration is decreased by 2.5%, 5%, 7.5%, 10%, 15%, 20%, 25%, 30%, 35%, 40%, 45%, 50%, 55%, 60%, 65%, 70%, 75%, 80%, 85%, 90%, 95%, or 100%, or by a range defined by any of the two aforementioned percentages.

[0029] In some embodiments, the composition comprises an oligonucleotide that targets MTRES1 and when administered to a subject in an effective amount decreases central nervous system (CNS) amyloid plaques in the subject. In some embodiments, the CNS amyloid plaques are decreased by about 2.5% or more, about 5% or more, or about 7.5% or more, as compared to prior to administration. In some embodiments, the CNS amyloid plaques are decreased by about 10% or more, as compared to prior to administration. In some embodiments, the CNS amyloid plaques are decreased by about 20% or more, about 30% or more, about 40% or more, about 50% or more, about 60% or more, about 70% or more, about 80% or more, about 90% or more, or about 100%, as compared to prior to administration. In some embodiments, the CNS amyloid plaques are decreased by no more than about 2.5%, no more than about 5%, or no more than about 7.5%, as compared to prior to administration. In some embodiments, the CNS amyloid plaques are decreased by no more than about 10%, as compared to prior to administration. In some embodiments, the CNS amyloid plaques are decreased by no more than about 20%, no more than about 30%, no more than about 40%, no more than about 50%, no more than about 60%, no more than about 70%, no more than about 80%, or no more than about 90%, as compared to prior to administration. In some embodiments, the CNS amyloid plaques are decreased by 2.5%, 5%, 7.5%, 10%, 15%, 20%, 25%, 30%, 35%, 40%, 45%, 50%, 55%, 60%, 65%, 70%, 75%, 80%, 85%, 90%, 95%, or 100%, or by a range defined by any of the two aforementioned percentages.

[0030] In some embodiments, the composition comprises an oligonucleotide that targets MTRES1 and when administered to a subject in an effective amount decreases central nervous system (CNS) tau accumulation in the subject. In some embodiments, the CNS tau accumulation is decreased by about 2.5% or more, about 5% or more, or about 7.5% or more, as compared to prior to administration. In some embodiments, the CNS tau accumulation is decreased by about 10% or more, as compared to prior to administration. In some embodiments, the CNS tau accumulation is decreased by about 20% or more, about 30% or more, about 40% or more, about 50% or more, about 60% or more, about 70% or more, about 80% or more, about 90% or more, or about 100%, as compared to prior to administration. In some embodiments, the CNS tau accumulation is decreased by no more than about 2.5%, no more than about 5%, or no more than about 7.5%, as compared to prior to administration. In some embodiments, the CNS tau accumulation is decreased by no more than about 10%, as compared to prior to administration. In some embodiments, the CNS tau accumulation is decreased by no more than about 20%, no more than about 30%, no more than about 40%, no more than about 50%, no more than about 60%, no more than about 70%, no more than about 80%, or no more than about 90%, as compared to prior to administration. In some embodiments, the CNS tau accumulation is decreased by 2.5%, 5%, 7.5%, 10%, 15%, 20%, 25%, 30%, 35%, 40%, 45%, 50%, 55%, 60%, 65%, 70%, 75%, 80%, 85%, 90%, 95%, or 100%, or by a range defined by any of the two aforementioned percentages.

[0031] In some embodiments, the composition comprises an oligonucleotide that targets MTRES1 and when administered to a subject in an effective amount decreases cerebrospinal fluid (CSF) beta-amyloid 42 in the subject. In some embodiments, the CSF beta-amyloid 42 is decreased by about 2.5% or more, about 5% or more, or about 7.5% or more, as compared to prior to administration. In some embodiments, the CSF beta-amyloid 42 is decreased by about 10% or more, as compared to prior to administration. In some embodiments, the CSF beta-amyloid 42 is decreased by about 20% or more, about 30% or more, about 40% or more, about 50% or more, about 60% or more, about 70% or more, about 80% or more, about 90% or more, or about 100%, as compared to prior to administration. In some embodiments, the CSF beta-amyloid 42 is decreased by no more than about 2.5%, no more than about 5%, or no more than about 7.5%, as compared to prior to administration. In some embodiments, the CSF beta-amyloid 42 is decreased by no more than about 10%, as compared to prior to administration. In some embodiments, the CSF beta-amyloid 42 is decreased by no more than about 20%, no more than about 30%, no more than about 40%, no more than about 50%, no more than about 60%, no more than about 70%, no more than about 80%, or no more than about 90%, as compared to prior to administration. In some embodiments, the CSF beta-amyloid 42 is decreased by 2.5%, 5%, 7.5%, 10%, 15%, 20%, 25%, 30%, 35%, 40%, 45%, 50%, 55%, 60%, 65%, 70%, 75%, 80%, 85%, 90%, 95%, or 100%, or by a range defined by any of the two aforementioned percentages.

[0032] In some embodiments, the composition comprises an oligonucleotide that targets MTRES1 and when administered to a subject in an effective amount decreases cerebrospinal fluid (CSF) tau in the subject. In some embodiments, the CSF tau is decreased by about 2.5% or more, about 5% or more, or about 7.5% or more, as compared to prior to administration. In some embodiments, the CSF tau is decreased by about 10% or more, as compared to prior to administration. In some embodiments, the CSF tau is decreased by about 20% or more, about 30% or more, about 40% or more, about 50% or more, about 60% or more, about 70% or more, about 80% or more, about 90% or more, or about 100%, as compared to prior to administration. In some embodiments, the CSF tau is decreased by no more than about 2.5%, no more than about 5%, or no more than about 7.5%, as compared to prior to administration. In some embodiments, the CSF tau is decreased by no more than about 10%, as compared to prior to administration. In some embodiments, the CSF tau is decreased by no more than about 20%, no more than about 30%, no more than about 40%, no more than about 50%, no more than about 60%, no more than about 70%, no more than about 80%, or no more than about 90%, as compared to prior to administration. In some embodiments, the CSF tau is decreased by 2.5%, 5%, 7.5%, 10%, 15%, 20%, 25%, 30%, 35%, 40%, 45%, 50%, 55%, 60%, 65%, 70%, 75%, 80%, 85%, 90%, 95%, or 100%, or by a range defined by any of the two aforementioned percentages.

[0033] In some embodiments, the composition comprises an oligonucleotide that targets MTRES1 and when administered to a subject in an effective amount decreases cerebrospinal fluid (CSF) tau in the subject. In some embodiments, the CSF phospho-tau is decreased by about 2.5% or more, about 5% or more, or about 7.5% or more, as compared to prior to administration. In some embodiments, the CSF phospho-tau is decreased by about 10% or more, as compared to prior to administration. In some embodiments, the CSF phospho-tau is decreased by about 20% or more, about 30% or more, about 40% or more, about 50% or more, about 60% or more, about 70% or more, about 80% or more, about 90% or more, or about 100%, as compared to prior to administration. In some embodiments, the CSF phospho-tau is decreased by no more than about 2.5%, no more than about 5%, or no more than about 7.5%, as compared to prior to administration. In some embodiments, the CSF phospho-tau is decreased by no more than about 10%, as compared to prior to administration. In some embodiments, the CSF phospho-tau is decreased by no more than about 20%, no more than about 30%, no more than about 40%, no more than about 50%, no more than about 60%, no more than about 70%, no more than about 80%, or no more than about 90%, as compared to prior to administration. In some embodiments, the CSF phospho-tau is decreased by 2.5%, 5%, 7.5%, 10%, 15%, 20%, 25%, 30%, 35%, 40%, 45%, 50%, 55%, 60%, 65%, 70%, 75%, 80%, 85%, 90%, 95%, or 100%, or by a range defined by any of the two aforementioned percentages.

[0034] In some embodiments, the composition comprises an oligonucleotide that targets MTRES1 and when administered to a subject in an effective amount decreases cerebrospinal fluid (CSF) alpha-synuclein in the subject. In some embodiments, the CSF alpha-synuclein is decreased by about 2.5% or more, about 5% or more, or about 7.5% or more, as compared to prior to administration. In some embodiments, the CSF alpha-synuclein is decreased by about 10% or more, as compared to prior to administration. In some embodiments, the CSF alpha-synuclein is decreased by about 20% or more, about 30% or more, about 40% or more, about 50% or more, about 60% or more, about 70% or more, about 80% or more, about 90% or more, or about 100%, as compared to prior to administration. In some embodiments, the CSF alpha-synuclein is decreased by no more than about 2.5%, no more than about 5%, or no more than about 7.5%, as compared to prior to administration. In some embodiments, the CSF alpha-synuclein is decreased by no more than about 10%, as compared to prior to administration. In some embodiments, the CSF alpha-synuclein is decreased by no more than about 20%, no more than about 30%, no more than about 40%, no more than about 50%, no more than about 60%, no more than about 70%, no more than about 80%, or no more than about 90%, as compared to prior to administration. In some embodiments, the CSF alpha-synuclein is decreased by 2.5%, 5%, 7.5%, 10%, 15%, 20%, 25%, 30%, 35%, 40%, 45%, 50%, 55%, 60%, 65%, 70%, 75%, 80%, 85%, 90%, 95%, or 100%, or by a range defined by any of the two aforementioned percentages.

[0035] In some embodiments, the composition comprises an oligonucleotide that targets MTRES1 and when administered to a subject in an effective amount decreases Lewy bodies in the subject. In some embodiments, the Lewy bodies are decreased by about 2.5% or more, about 5% or more, or about 7.5% or more, as compared to prior to administration. In some embodiments, the Lewy bodies are decreased by about 10% or more, as compared to prior to administration. In some embodiments, the Lewy bodies are decreased by about 20% or more, about 30% or more, about 40% or more, about 50% or more, about 60% or more, about 70% or more, about 80% or more, about 90% or more, or about 100%, as compared to prior to administration. In some embodiments, the Lewy bodies are decreased by no more than about 2.5%, no more than about 5%, or no more than about 7.5%, as compared to prior to administration. In some embodiments, the Lewy bodies are decreased by no more than about 10%, as compared to prior to administration. In some embodiments, the Lewy bodies are decreased by no more than about 20%, no more than about 30%, no more than about 40%, no more than about 50%, no more than about 60%, no more than about 70%, no more than about 80%, or no more than about 90%, as compared to prior to administration. In some embodiments, the Lewy bodies are decreased by 2.5%, 5%, 7.5%, 10%, 15%, 20%, 25%, 30%, 35%, 40%, 45%, 50%, 55%, 60%, 65%, 70%, 75%, 80%, 85%, 90%, 95%, or 100%, or by a range defined by any of the two aforementioned percentages.

[0036] In some embodiments, the composition comprises an oligonucleotide that targets MTRES1 and when administered to a subject in an effective amount increases cognitive function. In some embodiments, the cognitive function is increased by about 2.5% or more, about 5% or more, or about 7.5% or more, as compared to prior to administration. In some embodiments, the cognitive function is increased by about 10% or more, as compared to prior to administration. In some embodiments, the cognitive function is increased by about 20% or more, about 30% or more, about 40% or more, about 50% or more, about 60% or more, about 70% or more, about 80% or more, about 90% or more, or about 100% or more, as compared to prior to administration. In some embodiments, the cognitive function is increased by about 200% or more, about 300% or more, about 400% or more, about 500% or more, about 600% or more, about 700% or more, about 800% or more, about 900% or more, or about 1000% or more, as compared to prior to administration. In some embodiments, the cognitive function is increased by no more than about 2.5%, no more than about 5%, or no more than about 7.5%, as compared to prior to administration. In some embodiments, the cognitive function is increased by no more than about 10%, as compared to prior to administration. In some embodiments, the cognitive function is increased by no more than about 20%, no more than about 30%, no more than about 40%, no more than about 50%, no more than about 60%, no more than about 70%, no more than about 80%, no more than about 90%, or no more than about 100%, as compared to prior to administration. In some embodiments, the cognitive function is increased by no more than about 200%, no more than about 300%, no more than about 400%, no more than about 500%, no more than about 600%, no more than about 700%, no more than about 800%, no more than about 900%, or no more than about 1000%, as compared to prior to administration. In some embodiments, the cognitive function is increased by 2.5%, 5%, 7.5%, 10%, 15%, 20%, 25%, 30%, 35%, 40%, 45%, 50%, 55%, 60%, 65%, 70%, 75%, 80%, 85%, 90%, 95%, 100%, 150%, 200%, 250%, 300%, 400%, 500%, 600%, 700%, 800%, 900%, or 1000%, or by a range defined by any of the two aforementioned percentages.

A. siRNAs

[0037] In some embodiments, the composition comprises an oligonucleotide that targets MTRES1, wherein the oligonucleotide comprises a small interfering RNA (siRNA). In some embodiments, the composition comprises an oligonucleotide that targets MTRES1, wherein the oligonucleotide comprises a small interfering RNA (siRNA) comprising a sense strand and an antisense strand.

[0038] In some embodiments, the composition comprises an oligonucleotide that inhibits the expression of MTRES1, wherein the oligonucleotide comprises an siRNA comprising a sense strand and an antisense strand, wherein the sense strand is 12-30 nucleosides in length. In some embodiments, the composition comprises a sense strand that is 10, 11, 12, 13, 14, 15, 16, 17, 18, 19, 20, 21, 22, 23, 24, 25, 26, 27, 28, 29, or 30 nucleosides in length, or a range defined by any of the two aforementioned numbers. The sense strand may be 14-30 nucleosides in length. In some embodiments, the composition comprises an antisense strand is 12-30 nucleosides in length. In some embodiments, the composition comprises an antisense strand that is 10, 11, 12, 13, 14, 15, 16, 17, 18, 19, 20, 21, 22, 23, 24, 25, 26, 27, 28, 29, or 30 nucleosides in length, or a range defined by any of the two aforementioned numbers. The antisense strand may be 14-30 nucleosides in length.

[0039] In some embodiments, the composition comprises an oligonucleotide that inhibits the expression of MTRES1, wherein the oligonucleotide comprises an siRNA comprising a sense strand and an antisense strand, each strand is independently about 12-30 nucleosides in length, and at least one of the sense strand and the antisense strand comprises a nucleoside sequence comprising about 12-30 contiguous nucleosides of a full-length human MTRES1 mRNA sequence such as SEQ ID NO: 2443. In some embodiments, at least one of the sense strand and the antisense strand comprise a nucleoside sequence comprising at least about 10, 11, 12, 13, 14, 15, 16, 17, 18, 19, 20, 21, 22, 23, 24, 25, 26, 27, 28, 29, 30, or more contiguous nucleosides of one of SEQ ID NO: 2443.

[0040] In some embodiments, the composition comprises an oligonucleotide that inhibits the expression of MTRES1, wherein the oligonucleotide comprises an siRNA comprising a sense strand and an antisense strand, each strand is independently about 12-30 nucleosides in length, and at least one of the sense strand and the antisense strand comprises a nucleoside sequence comprising about 12-30 contiguous nucleosides of a full-length human MTRES1 mRNA sequence such as SEQ ID NO: 2462. In some embodiments, at least one of the sense strand and the antisense strand comprise a nucleoside sequence comprising at least about 10, 11, 12, 13, 14, 15, 16, 17, 18, 19, 20, 21, 22, 23, 24, 25, 26, 27, 28, 29, 30, or more contiguous nucleosides of one of SEQ ID NO: 2462.

[0041] In some embodiments, the composition comprises an oligonucleotide that inhibits the expression of MTRES1, wherein the oligonucleotide comprises an siRNA comprising a sense strand and an antisense strand, wherein the sense strand and the antisense strand form a double-stranded RNA duplex. In some embodiments, the first base pair of the double-stranded RNA duplex is an AU base pair.

[0042] In some embodiments, the sense strand further comprises a 3′ overhang. In some embodiments, the 3′ overhang comprises 1, 2, 3, 4, 5, 6, 7, 8, 9, or 10 nucleosides, or a range of nucleotides defined by any two of the aforementioned numbers. In some embodiments, the 3′ overhang comprises 1, 2, or more nucleosides. In some embodiments, the 3′ overhang comprises 2 nucleosides. In some embodiments, the sense strand further comprises a 5′ overhang. In some embodiments, the 5′ overhang comprises 1, 2, 3, 4, 5, 6, 7, 8, 9, or 10 nucleosides, or a range of nucleotides defined by any two of the aforementioned numbers. In some embodiments, the 5′ overhang comprises 1, 2, or more nucleosides. In some embodiments, the 5′ overhang comprises 2 nucleosides.

[0043] In some embodiments, the antisense strand further comprises a 3′ overhang. In some embodiments, the 3′ overhang comprises 1, 2, 3, 4, 5, 6, 7, 8, 9, or 10 nucleosides, or a range of nucleotides defined by any two of the aforementioned numbers. In some embodiments, the 3′ overhang comprises 1, 2, or more nucleosides. In some embodiments, the 3′ overhang comprises 2 nucleosides. In some embodiments, the antisense strand further comprises a 5′ overhang. In some embodiments, the 5′ overhang comprises 1, 2, 3, 4, 5, 6, 7, 8, 9, or 10 nucleosides, or a range of nucleotides defined by any two of the aforementioned numbers. In some embodiments, the 5′ overhang comprises 1, 2, or more nucleosides. In some embodiments, the 5′ overhang comprises 2 nucleosides.

[0044] In some embodiments, the composition comprises an oligonucleotide that inhibits the expression of MTRES1, wherein the oligonucleotide comprises an siRNA comprising a sense strand and an antisense strand, wherein the siRNA binds with a 19mer in a human MTRES1 mRNA. In some embodiments, the siRNA binds with a 12mer, a 13mer, a 14mer, a 15mer, a 16mer, a 17mer, a 18mer, a 19mer, a 20mer, a 21mer, a 22mer, a 23mer, a 24mer, or a 25mer in a human MTRES1 mRNA.

[0045] In some embodiments, the composition comprises an oligonucleotide that inhibits the expression of MTRES1, wherein the oligonucleotide comprises an siRNA comprising a sense strand and an antisense strand, wherein the siRNA binds with a 17mer in a non-human primate MTRES1 mRNA. In some embodiments, the siRNA binds with a 12mer, a 13mer, a 14mer, a 15mer, a 16mer, a 17mer, a 18mer, a 19mer, a 20mer, a 21mer, a 22mer, a 23mer, a 24mer, or a 25mer in a non-human primate MTRES1 mRNA.

[0046] In some embodiments, the composition comprises an oligonucleotide that inhibits the expression of MTRES1, wherein the oligonucleotide comprises an siRNA comprising a sense strand and an antisense strand, wherein the siRNA binds with a human MTRES1 mRNA and less than or equal to 20 human off-targets, with no more than 2 mismatches in the antisense strand. In some embodiments, the siRNA binds with a human MTRES1 mRNA and less than or equal to 10 human off-targets, with no more than 2 mismatches in the antisense strand. In some embodiments, the siRNA binds with a human MTRES1 mRNA and less than or equal to 30 human off-targets, with no more than 2 mismatches in the antisense strand. In some embodiments, the siRNA binds with a human MTRES1 mRNA and less than or equal to 40 human off-targets, with no more than 2 mismatches in the antisense strand. In some embodiments, the siRNA binds with a human MTRES1 mRNA and less than or equal to 50 human off-targets, with no more than 2 mismatches in the antisense strand. In some embodiments, the siRNA binds with a human MTRES1 mRNA and less than or equal to 10 human off-targets, with no more than 3 mismatches in the antisense strand. In some embodiments, the siRNA binds with a human MTRES1 mRNA and less than or equal to 20 human off-targets, with no more than 3 mismatches in the antisense strand. In some embodiments, the siRNA binds with a human MTRES1 mRNA and less than or equal to 30 human off-targets, with no more than 3 mismatches in the antisense strand. In some embodiments, the siRNA binds with a human MTRES1 mRNA and less than or equal to 40 human off-targets, with no more than 3 mismatches in the antisense strand. In some embodiments, the siRNA binds with a human MTRES1 mRNA and less than or equal to 50 human off-targets, with no more than 3 mismatches in the antisense strand.

[0047] In some embodiments, the composition comprises an oligonucleotide that inhibits the expression of MTRES1, wherein the oligonucleotide comprises an siRNA comprising a sense strand and an antisense strand, siRNA binds with a human MTRES1 mRNA target site that does not harbor an SNP, with a minor allele frequency (MAF) greater or equal to 1% (pos. 2-18). In some embodiments, the MAF is greater or equal to about 2%, about 3%, about 4%, about 5%, about 6%, about 7%, about 8%, about 9%, about 10%, about 11%, about 12%, about 13%, about 14%, about 15%, about 16%, about 17%, about 18%, about 19%, or about 20%.

[0048] In some embodiments, the composition comprises an oligonucleotide that inhibits the expression of MTRES1, wherein the oligonucleotide comprises an siRNA comprising a sense strand and an antisense strand, wherein the sense strand comprises a nucleoside sequence comprising or consisting of the sequence of any one of SEQ ID NOs: 1-1140, or a nucleic acid sequence thereof having 1 or 2 nucleoside substitutions, additions, or deletions. In some embodiments, the sense strand comprises a nucleoside sequence comprising or consisting of the sequence of any one of SEQ ID NOs: 1-1140, or a nucleic acid sequence thereof having 3 or 4 nucleoside substitutions, additions, or deletions. In some embodiments, the sense strand further comprises a 3′ overhang. In some embodiments, the 3′ overhang comprises 1, 2, 3, 4, 5, 6, 7, 8, 9, or 10 nucleosides, or a range of nucleotides defined by any two of the aforementioned numbers. In some embodiments, the 3′ overhang comprises 1, 2, or more nucleosides. In some embodiments, the 3′ overhang comprises 2 nucleosides. In some embodiments, the sense strand further comprises a 5′ overhang. In some embodiments, the 5′ overhang comprises 1, 2, 3, 4, 5, 6, 7, 8, 9, or 10 nucleosides, or a range of nucleotides defined by any two of the aforementioned numbers. In some embodiments, the 5′ overhang comprises 1, 2, or more nucleosides. In some embodiments, the 5′ overhang comprises 2 nucleosides. In some embodiments, the sense strand comprises a nucleoside sequence comprising or consisting of the sequence of any one of SEQ ID NOs: 1-1140, or a nucleic acid sequence thereof having 1 or 2 nucleoside additions at the 3′ end. In some embodiments, the composition comprises an oligonucleotide that inhibits the expression of MTRES1, wherein the oligonucleotide comprises an siRNA comprising a sense strand and an antisense strand, wherein the sense strand comprises a nucleoside sequence comprising or consisting of the sequence of any one of SEQ ID NOs: 1-1140.

[0049] In some embodiments, the composition comprises an oligonucleotide that inhibits the expression of MTRES1, wherein the oligonucleotide comprises an siRNA comprising a sense strand and an antisense strand, wherein the antisense strand comprises a nucleoside sequence comprising or consisting of the sequence of any one of SEQ ID NOs: 1141-2280, or a nucleic acid sequence thereof having 1 or 2 nucleoside substitutions, additions, or deletions. In some embodiments, the antisense strand sequence comprises a nucleoside sequence comprising or consisting of the sequence of any one of SEQ ID NOs: 1141-2280, or a nucleic acid sequence thereof having 3 or 4 nucleoside substitutions, additions, or deletions. In some embodiments, the antisense strand further comprises a 3′ overhang. In some embodiments, the 3′ overhang comprises 1, 2, 3, 4, 5, 6, 7, 8, 9, or 10 nucleosides, or a range of nucleotides defined by any two of the aforementioned numbers. In some embodiments, the 3′ overhang comprises 1, 2, or more nucleosides. In some embodiments, the 3′ overhang comprises 2 nucleosides. In some embodiments, the antisense strand further comprises a 5′ overhang. In some embodiments, the 5′ overhang comprises 1, 2, 3, 4, 5, 6, 7, 8, 9, or 10 nucleosides, or a range of nucleotides defined by any two of the aforementioned numbers. In some embodiments, the 5′ overhang comprises 1, 2, or more nucleosides. In some embodiments, the 5′ overhang comprises 2 nucleosides. In some embodiments, the antisense strand comprises a nucleoside sequence comprising or consisting of the sequence of any one of SEQ ID NOs: 1141-2280, or a nucleic acid sequence thereof having 1 or 2 nucleoside additions at the 3′ end. In some embodiments, the composition comprises an oligonucleotide that inhibits the expression of MTRES1, wherein the oligonucleotide comprises an siRNA comprising a sense strand and an antisense strand, wherein the antisense strand comprises a nucleoside sequence comprising or consisting of the sequence of any one of SEQ ID NOs: 1141-2280.

[0050] In some embodiments, the siRNA comprises the sense strand and/or the antisense strand sequence of an siRNA in any one of Tables 3-8, or a nucleic acid sequence thereof having 3 or 4 nucleoside substitutions, additions, or deletions. In some embodiments, the siRNA comprises the sense strand and/or the antisense strand sequence of an siRNA in any one of Tables 3-8, or a nucleic acid sequence thereof having 1 or 2 nucleoside substitutions, additions, or deletions. In some embodiments, the siRNA comprises the sense strand and/or the antisense strand sequence of an siRNA in any one of Tables 3-8. In some embodiments, the siRNA is cross-reactive with a non-human primate (NHP) MTRES1 mRNA. The siRNA may include one or more internucleoside linkages and/or one or more nucleoside modifications.

[0051] In some embodiments, the siRNA comprises the sense strand and/or the antisense strand sequence of an siRNA in Table 12B, or a nucleic acid sequence thereof having 3 or 4 nucleoside substitutions, additions, or deletions. In some embodiments, the siRNA comprises the sense strand and/or the antisense strand sequence of an siRNA in Table 12B, or a nucleic acid sequence thereof having 1 or 2 nucleoside substitutions, additions, or deletions. In some embodiments, the siRNA comprises the sense strand and/or the antisense strand sequence of an siRNA in Table 12B. In some embodiments, the siRNA is cross-reactive with a non-human primate (NHP) MTRES1 mRNA. The siRNA may include one or more internucleoside linkages and/or one or more nucleoside modifications. The siRNA may include a moiety such as a lipid moiety or a GalNAc moiety.

[0052] In some embodiments, the siRNA comprises the sense strand and/or the antisense strand sequence of an siRNA in Table 14B, or a nucleic acid sequence thereof having 3 or 4 nucleoside substitutions, additions, or deletions. In some embodiments, the siRNA comprises the sense strand and/or the antisense strand sequence of an siRNA in Table 14B, or a nucleic acid sequence thereof having 1 or 2 nucleoside substitutions, additions, or deletions. In some embodiments, the siRNA comprises the sense strand and/or the antisense strand sequence of an siRNA in Table 14B. In some embodiments, the siRNA is cross-reactive with a non-human primate (NHP) MTRES1 mRNA. The siRNA may include one or more internucleoside linkages and/or one or more nucleoside modifications. The siRNA may include a moiety such as a lipid moiety or a GalNAc moiety.

[0053] In some embodiments, the siRNA comprises the sense strand and/or the antisense strand sequence of an siRNA in Table 16B, or a nucleic acid sequence thereof having 3 or 4 nucleoside substitutions, additions, or deletions. In some embodiments, the siRNA comprises the sense strand and/or the antisense strand sequence of an siRNA in Table 16B, or a nucleic acid sequence thereof having 1 or 2 nucleoside substitutions, additions, or deletions. In some embodiments, the siRNA comprises the sense strand and/or the antisense strand sequence of an siRNA in Table 16B. In some embodiments, the siRNA is cross-reactive with a non-human primate (NHP) MTRES1 mRNA. The siRNA may include one or more internucleoside linkages and/or one or more nucleoside modifications. The siRNA may include a moiety such as a lipid moiety or a GalNAc moiety.

[0054] In some embodiments, the siRNA comprises the sense strand and/or the antisense strand sequence of an siRNA in Table 52B, or a nucleic acid sequence thereof having 3 or 4 nucleoside substitutions, additions, or deletions. In some embodiments, the siRNA comprises the sense strand and/or the antisense strand sequence of an siRNA in Table 52B, or a nucleic acid sequence thereof having 1 or 2 nucleoside substitutions, additions, or deletions. In some embodiments, the siRNA comprises the sense strand and/or the antisense strand sequence of an siRNA in Table 52B. In some embodiments, the siRNA is cross-reactive with a non-human primate (NHP) MTRES1 mRNA. The siRNA may include one or more internucleoside linkages and/or one or more nucleoside modifications. The siRNA may include a moiety such as a lipid moiety or a GalNAc moiety.

[0055] In some embodiments, the siRNA comprises the sense strand and/or the antisense strand sequence of an siRNA in Table 54B, or a nucleic acid sequence thereof having 3 or 4 nucleoside substitutions, additions, or deletions. In some embodiments, the siRNA comprises the sense strand and/or the antisense strand sequence of an siRNA in Table 54B, or a nucleic acid sequence thereof having 1 or 2 nucleoside substitutions, additions, or deletions. In some embodiments, the siRNA comprises the sense strand and/or the antisense strand sequence of an siRNA in Table 54B. In some embodiments, the siRNA is cross-reactive with a non-human primate (NHP) MTRES1 mRNA. The siRNA may include one or more internucleoside linkages and/or one or more nucleoside modifications. The siRNA may include a moiety such as a lipid moiety or a GalNAc moiety.

[0056] In some embodiments, the siRNA comprises the sense strand and/or the antisense strand sequence of an siRNA in Table 57, or a nucleic acid sequence thereof having 3 or 4 nucleoside substitutions, additions, or deletions. In some embodiments, the siRNA comprises the sense strand and/or the antisense strand sequence of an siRNA in Table 57, or a nucleic acid sequence thereof having 1 or 2 nucleoside substitutions, additions, or deletions. In some embodiments, the siRNA comprises the sense strand and/or the antisense strand sequence of an siRNA in Table 57. In some embodiments, the siRNA is cross-reactive with a non-human primate (NHP) MTRES1 mRNA. The siRNA may include one or more internucleoside linkages and/or one or more nucleoside modifications. The siRNA may include a moiety such as a lipid moiety or a GalNAc moiety.

[0057] In some embodiments, the siRNA comprises the sense strand and/or the antisense strand sequence of an siRNA in Table 60, or a nucleic acid sequence thereof having 3 or 4 nucleoside substitutions, additions, or deletions. In some embodiments, the siRNA comprises the sense strand and/or the antisense strand sequence of an siRNA in Table 60, or a nucleic acid sequence thereof having 1 or 2 nucleoside substitutions, additions, or deletions. In some embodiments, the siRNA comprises the sense strand and/or the antisense strand sequence of an siRNA in Table 60. In some embodiments, the siRNA is cross-reactive with a non-human primate (NHP) MTRES1 mRNA. The siRNA may include one or more internucleoside linkages and/or one or more nucleoside modifications. The siRNA may include a moiety such as a lipid moiety or a GalNAc moiety.

[0058] In some embodiments, the siRNA comprises the sense strand and/or the antisense strand sequence of an siRNA in Table 62B, or a nucleic acid sequence thereof having 3 or 4 nucleoside substitutions, additions, or deletions. In some embodiments, the siRNA comprises the sense strand and/or the antisense strand sequence of an siRNA in Table 62B, or a nucleic acid sequence thereof having 1 or 2 nucleoside substitutions, additions, or deletions. In some embodiments, the siRNA comprises the sense strand and/or the antisense strand sequence of an siRNA in Table 62B. In some embodiments, the siRNA is cross-reactive with a non-human primate (NHP) MTRES1 mRNA. The siRNA may include one or more internucleoside linkages and/or one or more nucleoside modifications. The siRNA may include a moiety such as a lipid moiety or a GalNAc moiety.

[0059] In some embodiments, the siRNA comprises the sense strand and/or the antisense strand sequence of an siRNA in Table 64B, or a nucleic acid sequence thereof having 3 or 4 nucleoside substitutions, additions, or deletions. In some embodiments, the siRNA comprises the sense strand and/or the antisense strand sequence of an siRNA in Table 64B, or a nucleic acid sequence thereof having 1 or 2 nucleoside substitutions, additions, or deletions. In some embodiments, the siRNA comprises the sense strand and/or the antisense strand sequence of an siRNA in Table 64B. In some embodiments, the siRNA is cross-reactive with a non-human primate (NHP) MTRES1 mRNA. The siRNA may include one or more internucleoside linkages and/or one or more nucleoside modifications. The siRNA may include a moiety such as a lipid moiety or a GalNAc moiety.

[0060] In some embodiments, the siRNA comprises the sense strand and/or the antisense strand sequence of an siRNA in Table 67B, or a nucleic acid sequence thereof having 3 or 4 nucleoside substitutions, additions, or deletions. In some embodiments, the siRNA comprises the sense strand and/or the antisense strand sequence of an siRNA in Table 67B, or a nucleic acid sequence thereof having 1 or 2 nucleoside substitutions, additions, or deletions. In some embodiments, the siRNA comprises the sense strand and/or the antisense strand sequence of an siRNA in Table 67B. In some embodiments, the siRNA is cross-reactive with a non-human primate (NHP) MTRES1 mRNA. The siRNA may include one or more internucleoside linkages and/or one or more nucleoside modifications. The siRNA may include a moiety such as a lipid moiety or a GalNAc moiety.

[0061] In some embodiments, the siRNA comprises the sense strand and/or the antisense strand sequence of an siRNA in Table 69, or a nucleic acid sequence thereof having 3 or 4 nucleoside substitutions, additions, or deletions. In some embodiments, the siRNA comprises the sense strand and/or the antisense strand sequence of an siRNA in Table 69, or a nucleic acid sequence thereof having 1 or 2 nucleoside substitutions, additions, or deletions. In some embodiments, the siRNA comprises the sense strand and/or the antisense strand sequence of an siRNA in Table 69. In some embodiments, the siRNA is cross-reactive with a non-human primate (NHP) MTRES1 mRNA. The siRNA may include one or more internucleoside linkages and/or one or more nucleoside modifications. The siRNA may include a moiety such as a lipid moiety or a GalNAc moiety.

[0062] In some embodiments, the siRNA comprises the sense strand and/or the antisense strand sequence of an siRNA in Table 72, or a nucleic acid sequence thereof having 3 or 4 nucleoside substitutions, additions, or deletions. In some embodiments, the siRNA comprises the sense strand and/or the antisense strand sequence of an siRNA in Table 72, or a nucleic acid sequence thereof having 1 or 2 nucleoside substitutions, additions, or deletions. In some embodiments, the siRNA comprises the sense strand and/or the antisense strand sequence of an siRNA in Table 72. In some embodiments, the siRNA is cross-reactive with a non-human primate (NHP) MTRES1 mRNA. The siRNA may include one or more internucleoside linkages and/or one or more nucleoside modifications. The siRNA may include a moiety such as a lipid moiety or a GalNAc moiety.

[0063] In some embodiments, the siRNA comprises the sense strand and/or the antisense strand sequence of an siRNA in Table 75, or a nucleic acid sequence thereof having 3 or 4 nucleoside substitutions, additions, or deletions. In some embodiments, the siRNA comprises the sense strand and/or the antisense strand sequence of an siRNA in Table 75, or a nucleic acid sequence thereof having 1 or 2 nucleoside substitutions, additions, or deletions. In some embodiments, the siRNA comprises the sense strand and/or the antisense strand sequence of an siRNA in Table 75. In some embodiments, the siRNA is cross-reactive with a non-human primate (NHP) MTRES1 mRNA. The siRNA may include one or more internucleoside linkages and/or one or more nucleoside modifications. The siRNA may include a moiety such as a lipid moiety or a GalNAc moiety.

[0064] In some embodiments, the siRNA comprises the sense strand and/or the antisense strand sequence of an siRNA in Table 78, or a nucleic acid sequence thereof having 3 or 4 nucleoside substitutions, additions, or deletions. In some embodiments, the siRNA comprises the sense strand and/or the antisense strand sequence of an siRNA in Table 78, or a nucleic acid sequence thereof having 1 or 2 nucleoside substitutions, additions, or deletions. In some embodiments, the siRNA comprises the sense strand and/or the antisense strand sequence of an siRNA in Table 78. In some embodiments, the siRNA is cross-reactive with a non-human primate (NHP) MTRES1 mRNA. The siRNA may include one or more internucleoside linkages and/or one or more nucleoside modifications. The siRNA may include a moiety such as a lipid moiety or a GalNAc moiety.

[0065] In some embodiments, the siRNA comprises the sense strand and/or the antisense strand sequence of an siRNA in Table 81, or a nucleic acid sequence thereof having 3 or 4 nucleoside substitutions, additions, or deletions. In some embodiments, the siRNA comprises the sense strand and/or the antisense strand sequence of an siRNA in Table 81, or a nucleic acid sequence thereof having 1 or 2 nucleoside substitutions, additions, or deletions. In some embodiments, the siRNA comprises the sense strand and/or the antisense strand sequence of an siRNA in Table 81. In some embodiments, the siRNA is cross-reactive with a non-human primate (NHP) MTRES1 mRNA. The siRNA may include one or more internucleoside linkages and/or one or more nucleoside modifications. The siRNA may include a moiety such as a lipid moiety or a GalNAc moiety.

[0066] In some embodiments, the siRNA comprises the sense strand and/or the antisense strand sequence of an siRNA in Table 84, or a nucleic acid sequence thereof having 3 or 4 nucleoside substitutions, additions, or deletions. In some embodiments, the siRNA comprises the sense strand and/or the antisense strand sequence of an siRNA in Table 84, or a nucleic acid sequence thereof having 1 or 2 nucleoside substitutions, additions, or deletions. In some embodiments, the siRNA comprises the sense strand and/or the antisense strand sequence of an siRNA in Table 84. In some embodiments, the siRNA is cross-reactive with a non-human primate (NHP) MTRES1 mRNA. The siRNA may include one or more internucleoside linkages and/or one or more nucleoside modifications. The siRNA may include a moiety such as a lipid moiety or a GalNAc moiety.

[0067] In some embodiments, the siRNA comprises the sense strand and/or the antisense strand sequence of an siRNA in Table 87, or a nucleic acid sequence thereof having 3 or 4 nucleoside substitutions, additions, or deletions. In some embodiments, the siRNA comprises the sense strand and/or the antisense strand sequence of an siRNA in Table 87, or a nucleic acid sequence thereof having 1 or 2 nucleoside substitutions, additions, or deletions. In some embodiments, the siRNA comprises the sense strand and/or the antisense strand sequence of an siRNA in Table 87. In some embodiments, the siRNA is cross-reactive with a non-human primate (NHP) MTRES1 mRNA. The siRNA may include one or more internucleoside linkages and/or one or more nucleoside modifications. The siRNA may include a moiety such as a lipid moiety or a GalNAc moiety.

[0068] In some embodiments, the siRNA comprises the sense strand and/or the antisense strand sequence of an siRNA in Table 90, or a nucleic acid sequence thereof having 3 or 4 nucleoside substitutions, additions, or deletions. In some embodiments, the siRNA comprises the sense strand and/or the antisense strand sequence of an siRNA in Table 90, or a nucleic acid sequence thereof having 1 or 2 nucleoside substitutions, additions, or deletions. In some embodiments, the siRNA comprises the sense strand and/or the antisense strand sequence of an siRNA in Table 90. In some embodiments, the siRNA is cross-reactive with a non-human primate (NHP) MTRES1 mRNA. The siRNA may include one or more internucleoside linkages and/or one or more nucleoside modifications. The siRNA may include a moiety such as a lipid moiety or a GalNAc moiety.

[0069] In some embodiments, the siRNA comprises the sense strand and/or the antisense strand sequence of an siRNA in Table 93, or a nucleic acid sequence thereof having 3 or 4 nucleoside substitutions, additions, or deletions. In some embodiments, the siRNA comprises the sense strand and/or the antisense strand sequence of an siRNA in Table 93, or a nucleic acid sequence thereof having 1 or 2 nucleoside substitutions, additions, or deletions. In some embodiments, the siRNA comprises the sense strand and/or the antisense strand sequence of an siRNA in Table 93. In some embodiments, the siRNA is cross-reactive with a non-human primate (NHP) MTRES1 mRNA. The siRNA may include one or more internucleoside linkages and/or one or more nucleoside modifications. The siRNA may include a moiety such as a lipid moiety or a GalNAc moiety.

[0070] In some embodiments, the siRNA comprises the sense strand and/or the antisense strand sequence of an siRNA in Table 96, or a nucleic acid sequence thereof having 3 or 4 nucleoside substitutions, additions, or deletions. In some embodiments, the siRNA comprises the sense strand and/or the antisense strand sequence of an siRNA in Table 96, or a nucleic acid sequence thereof having 1 or 2 nucleoside substitutions, additions, or deletions. In some embodiments, the siRNA comprises the sense strand and/or the antisense strand sequence of an siRNA in Table 96. In some embodiments, the siRNA is cross-reactive with a non-human primate (NHP) MTRES1 mRNA. The siRNA may include one or more internucleoside linkages and/or one or more nucleoside modifications. The siRNA may include a moiety such as a lipid moiety or a GalNAc moiety.

[0071] In some embodiments, the siRNA comprises the sense strand and/or the antisense strand sequence of an siRNA in Table 98, or a nucleic acid sequence thereof having 3 or 4 nucleoside substitutions, additions, or deletions. In some embodiments, the siRNA comprises the sense strand and/or the antisense strand sequence of an siRNA in Table 98, or a nucleic acid sequence thereof having 1 or 2 nucleoside substitutions, additions, or deletions. In some embodiments, the siRNA comprises the sense strand and/or the antisense strand sequence of an siRNA in Table 98. In some embodiments, the siRNA is cross-reactive with a non-human primate (NHP) MTRES1 mRNA. The siRNA may include one or more internucleoside linkages and/or one or more nucleoside modifications. The siRNA may include a moiety such as a lipid moiety or a GalNAc moiety.

[0072] In some embodiments, the composition comprises an oligonucleotide that inhibits the expression of MTRES1, wherein the oligonucleotide comprises an siRNA comprising a sense strand and an antisense strand, wherein the sense strand comprises a nucleoside sequence comprising or consisting of the sequence of any one of SEQ ID NOs: 2674-2855, or a nucleic acid sequence thereof having 1 or 2 nucleoside substitutions, additions, or deletions. In some embodiments, the sense strand comprises a nucleoside sequence comprising or consisting of the sequence of any one of SEQ ID NOs: 2674-2855, or a nucleic acid sequence thereof having 3 or 4 nucleoside substitutions, additions, or deletions. In some embodiments, the sense strand further comprises a 3′ overhang. In some embodiments, the 3′ overhang comprises 1, 2, 3, 4, 5, 6, 7, 8, 9, or 10 nucleosides, or a range of nucleotides defined by any two of the aforementioned numbers. In some embodiments, the 3′ overhang comprises 1, 2, or more nucleosides. In some embodiments, the 3′ overhang comprises 2 nucleosides. In some embodiments, the sense strand further comprises a 5′ overhang. In some embodiments, the 5′ overhang comprises 1, 2, 3, 4, 5, 6, 7, 8, 9, or 10 nucleosides, or a range of nucleotides defined by any two of the aforementioned numbers. In some embodiments, the 5′ overhang comprises 1, 2, or more nucleosides. In some embodiments, the 5′ overhang comprises 2 nucleosides. In some embodiments, the sense strand comprises a nucleoside sequence comprising or consisting of the sequence of any one of SEQ ID NOs: 2674-2855, or a nucleic acid sequence thereof having 1 or 2 nucleoside additions at the 3′ end. In some embodiments, the composition comprises an oligonucleotide that inhibits the expression of MTRES1, wherein the oligonucleotide comprises an siRNA comprising a sense strand and an antisense strand, wherein the sense strand comprises a nucleoside sequence comprising or consisting of the sequence of any one of SEQ ID NOs: 2674-2855.

[0073] In some embodiments, the composition comprises an oligonucleotide that inhibits the expression of MTRES1, wherein the oligonucleotide comprises an siRNA comprising a sense strand and an antisense strand, wherein the antisense strand comprises a nucleoside sequence comprising or consisting of the sequence of any one of SEQ ID NOs: 2856-3037, or a nucleic acid sequence thereof having 1 or 2 nucleoside substitutions, additions, or deletions. In some embodiments, the antisense strand sequence comprises a nucleoside sequence comprising or consisting of the sequence of any one of SEQ ID NOs: 2856-3037, or a nucleic acid sequence thereof having 3 or 4 nucleoside substitutions, additions, or deletions. In some embodiments, the antisense strand further comprises a 3′ overhang. In some embodiments, the 3′ overhang comprises 1, 2, 3, 4, 5, 6, 7, 8, 9, or 10 nucleosides, or a range of nucleotides defined by any two of the aforementioned numbers. In some embodiments, the 3′ overhang comprises 1, 2, or more nucleosides. In some embodiments, the 3′ overhang comprises 2 nucleosides. In some embodiments, the antisense strand further comprises a 5′ overhang. In some embodiments, the 5′ overhang comprises 1, 2, 3, 4, 5, 6, 7, 8, 9, or 10 nucleosides, or a range of nucleotides defined by any two of the aforementioned numbers. In some embodiments, the 5′ overhang comprises 1, 2, or more nucleosides. In some embodiments, the 5′ overhang comprises 2 nucleosides. In some embodiments, the antisense strand comprises a nucleoside sequence comprising or consisting of the sequence of any one of SEQ ID NOs: 2856-3037, or a nucleic acid sequence thereof having 1 or 2 nucleoside additions at the 3′ end. In some embodiments, the composition comprises an oligonucleotide that inhibits the expression of MTRES1, wherein the oligonucleotide comprises an siRNA comprising a sense strand and an antisense strand, wherein the antisense strand comprises a nucleoside sequence comprising or consisting of the sequence of any one of SEQ ID NOs: 2856-3037.

[0074] In some embodiments, the siRNA comprises the sense strand and/or the antisense strand sequence of an siRNA of subset A, or a nucleic acid sequence thereof having 3 or 4 nucleoside substitutions, additions, or deletions. In some embodiments, the siRNA comprises the sense strand and/or the antisense strand sequence of an siRNA of subset A, or a nucleic acid sequence thereof having 1 or 2 nucleoside substitutions, additions, or deletions. In some embodiments, the siRNA comprises the sense strand and/or the antisense strand sequence of an siRNA of subset A. In some embodiments, the siRNA is cross-reactive with a non-human primate (NHP) MTRES1 mRNA. The siRNA may include one or more internucleoside linkages and/or one or more nucleoside modifications.

[0075] In some embodiments, the siRNA comprises the sense strand and/or the antisense strand sequence of an siRNA of subset B, or a nucleic acid sequence thereof having 3 or 4 nucleoside substitutions, additions, or deletions. In some embodiments, the siRNA comprises the sense strand and/or the antisense strand sequence of an siRNA of subset B, or a nucleic acid sequence thereof having 1 or 2 nucleoside substitutions, additions, or deletions. In some embodiments, the siRNA comprises the sense strand and/or the antisense strand sequence of an siRNA of subset B. In some embodiments, the siRNA is cross-reactive with a non-human primate (NHP) MTRES1 mRNA. The siRNA may include one or more internucleoside linkages and/or one or more nucleoside modifications.

[0076] In some embodiments, the siRNA comprises the sense strand and/or the antisense strand sequence of an siRNA of subset C, or a nucleic acid sequence thereof having 3 or 4 nucleoside substitutions, additions, or deletions. In some embodiments, the siRNA comprises the sense strand and/or the antisense strand sequence of an siRNA of subset C, or a nucleic acid sequence thereof having 1 or 2 nucleoside substitutions, additions, or deletions. In some embodiments, the siRNA comprises the sense strand and/or the antisense strand sequence of an siRNA of subset C. In some embodiments, the siRNA is cross-reactive with a non-human primate (NHP) MTRES1 mRNA. The siRNA may include one or more internucleoside linkages and/or one or more nucleoside modifications.

[0077] In some embodiments, the siRNA comprises the sense strand and/or the antisense strand sequence of an siRNA of subset D, or a nucleic acid sequence thereof having 3 or 4 nucleoside substitutions, additions, or deletions. In some embodiments, the siRNA comprises the sense strand and/or the antisense strand sequence of an siRNA of subset D, or a nucleic acid sequence thereof having 1 or 2 nucleoside substitutions, additions, or deletions. In some embodiments, the siRNA comprises the sense strand and/or the antisense strand sequence of an siRNA of subset D. In some embodiments, the siRNA is cross-reactive with a non-human primate (NHP) MTRES1 mRNA. The siRNA may include one or more internucleoside linkages and/or one or more nucleoside modifications.

[0078] In some embodiments, the siRNA comprises the sense strand and/or the antisense strand sequence of an siRNA of subset E, or a nucleic acid sequence thereof having 3 or 4 nucleoside substitutions, additions, or deletions. In some embodiments, the siRNA comprises the sense strand and/or the antisense strand sequence of an siRNA of subset E, or a nucleic acid sequence thereof having 1 or 2 nucleoside substitutions, additions, or deletions. In some embodiments, the siRNA comprises the sense strand and/or the antisense strand sequence of an siRNA of subset E. In some embodiments, the siRNA is cross-reactive with a non-human primate (NHP) MTRES1 mRNA. The siRNA may include one or more internucleoside linkages and/or one or more nucleoside modifications.

[0079] In some embodiments, the siRNA comprises the sense strand and/or the antisense strand sequence of an siRNA of subset F, or a nucleic acid sequence thereof having 3 or 4 nucleoside substitutions, additions, or deletions. In some embodiments, the siRNA comprises the sense strand and/or the antisense strand sequence of an siRNA of subset F, or a nucleic acid sequence thereof having 1 or 2 nucleoside substitutions, additions, or deletions. In some embodiments, the siRNA comprises the sense strand and/or the antisense strand sequence of an siRNA of subset F. In some embodiments, the siRNA is cross-reactive with a non-human primate (NHP) MTRES1 mRNA. The siRNA may include one or more internucleoside linkages and/or one or more nucleoside modifications.

[0080] In some embodiments, the siRNA comprises a sense strand having a sequence in accordance with SEQ ID NO: 2576. In some embodiments, the sense strand sequence comprises or consists of sequence at least 75% identical to SEQ ID NO: 2576, at least 80% identical to SEQ ID NO: 2576, at least 85% identical to SEQ ID NO: 2576, at least 90% identical to SEQ ID NO: 2576, or at least 95% identical to SEQ ID NO: 2576. In some embodiments, the sense strand sequence comprises or consists of the sequence of SEQ ID NO: 2576, or a sense strand sequence thereof having 1, 2, 3, or 4 nucleoside substitutions, additions, or deletions. In some embodiments, the sense strand sequence comprises or consists of the sequence of SEQ ID NO: 2576, or a sense strand sequence thereof having 1 or 2 nucleoside substitutions, additions, or deletions. In some embodiments, the sense strand sequence comprises or consists of a sequence 100% identical to SEQ ID NO: 2576. The sense strand may comprise any modifications or modification pattern described herein. The sense strand may comprise a moiety such as a GalNAc moiety or a lipid moiety. In some embodiments, the siRNA comprises an antisense strand having a sequence in accordance with SEQ ID NO: 2638. In some embodiments, the antisense strand sequence comprises or consists of sequence at least 75% identical to SEQ ID NO: 2638, at least 80% identical to SEQ ID NO: 2638, at least 85% identical to SEQ ID NO: 2638, at least 90% identical to SEQ ID NO: 2638, or at least 95% identical to SEQ ID NO: 2638. In some embodiments, the antisense strand sequence comprises or consists of the sequence of SEQ ID NO: 2638, or an antisense strand sequence thereof having 1, 2, 3, or 4 nucleoside substitutions, additions, or deletions. In some embodiments, the antisense strand sequence comprises or consists of the sequence of SEQ ID NO: 2638, or an antisense strand sequence thereof having 1 or 2 nucleoside substitutions, additions, or deletions. In some embodiments, the antisense strand sequence comprises or consists of a sequence 100% identical to SEQ ID NO: 2638. The antisense strand may comprise any modifications or modification pattern described herein. The antisense strand may comprise a moiety such as a GalNAc moiety or a lipid moiety.

[0081] In some embodiments, the siRNA comprises a sense strand having a sequence in accordance with SEQ ID NO: 2582. In some embodiments, the sense strand sequence comprises or consists of sequence at least 75% identical to SEQ ID NO: 2582, at least 80% identical to SEQ ID NO: 2582, at least 85% identical to SEQ ID NO: 2582, at least 90% identical to SEQ ID NO: 2582, or at least 95% identical to SEQ ID NO: 2582. In some embodiments, the sense strand sequence comprises or consists of the sequence of SEQ ID NO: 2582, or a sense strand sequence thereof having 1, 2, 3, or 4 nucleoside substitutions, additions, or deletions. In some embodiments, the sense strand sequence comprises or consists of the sequence of SEQ ID NO: 2582, or a sense strand sequence thereof having 1 or 2 nucleoside substitutions, additions, or deletions. In some embodiments, the sense strand sequence comprises or consists of a sequence 100% identical to SEQ ID NO: 2582. The sense strand may comprise any modifications or modification pattern described herein. The sense strand may comprise a moiety such as a GalNAc moiety or a lipid moiety. In some embodiments, the siRNA comprises an antisense strand having a sequence in accordance with SEQ ID NO: 2644. In some embodiments, the antisense strand sequence comprises or consists of sequence at least 75% identical to SEQ ID NO: 2644, at least 80% identical to SEQ ID NO: 2644, at least 85% identical to SEQ ID NO: 2644, at least 90% identical to SEQ ID NO: 2644, or at least 95% identical to SEQ ID NO: 2644. In some embodiments, the antisense strand sequence comprises or consists of the sequence of SEQ ID NO: 2644, or an antisense strand sequence thereof having 1, 2, 3, or 4 nucleoside substitutions, additions, or deletions. In some embodiments, the antisense strand sequence comprises or consists of the sequence of SEQ ID NO: 2644, or an antisense strand sequence thereof having 1 or 2 nucleoside substitutions, additions, or deletions. In some embodiments, the antisense strand sequence comprises or consists of a sequence 100% identical to SEQ ID NO: 2644. The antisense strand may comprise any modifications or modification pattern described herein. The antisense strand may comprise a moiety such as a GalNAc moiety or a lipid moiety.

[0082] In some embodiments, the siRNA comprises a sense strand having a sequence in accordance with SEQ ID NO: 2583. In some embodiments, the sense strand sequence comprises or consists of sequence at least 75% identical to SEQ ID NO: 2583, at least 80% identical to SEQ ID NO: 2583, at least 85% identical to SEQ ID NO: 2583, at least 90% identical to SEQ ID NO: 2583, or at least 95% identical to SEQ ID NO: 2583. In some embodiments, the sense strand sequence comprises or consists of the sequence of SEQ ID NO: 2583, or a sense strand sequence thereof having 1, 2, 3, or 4 nucleoside substitutions, additions, or deletions. In some embodiments, the sense strand sequence comprises or consists of the sequence of SEQ ID NO: 2583, or a sense strand sequence thereof having 1 or 2 nucleoside substitutions, additions, or deletions. In some embodiments, the sense strand sequence comprises or consists of a sequence 100% identical to SEQ ID NO: 2583. The sense strand may comprise any modifications or modification pattern described herein. The sense strand may comprise a moiety such as a GalNAc moiety or a lipid moiety. In some embodiments, the siRNA comprises an antisense strand having a sequence in accordance with SEQ ID NO: 2645. In some embodiments, the antisense strand sequence comprises or consists of sequence at least 75% identical to SEQ ID NO: 2645, at least 80% identical to SEQ ID NO: 2645, at least 85% identical to SEQ ID NO: 2645, at least 90% identical to SEQ ID NO: 2645, or at least 95% identical to SEQ ID NO: 2645. In some embodiments, the antisense strand sequence comprises or consists of the sequence of SEQ ID NO: 2645, or an antisense strand sequence thereof having 1, 2, 3, or 4 nucleoside substitutions, additions, or deletions. In some embodiments, the antisense strand sequence comprises or consists of the sequence of SEQ ID NO: 2645, or an antisense strand sequence thereof having 1 or 2 nucleoside substitutions, additions, or deletions. In some embodiments, the antisense strand sequence comprises or consists of a sequence 100% identical to SEQ ID NO: 2645. The antisense strand may comprise any modifications or modification pattern described herein. The antisense strand may comprise a moiety such as a GalNAc moiety or a lipid moiety.

[0083] In some embodiments, the siRNA comprises a sense strand having a sequence in accordance with SEQ ID NO: 2584. In some embodiments, the sense strand sequence comprises or consists of sequence at least 75% identical to SEQ ID NO: 2584, at least 80% identical to SEQ ID NO: 2584, at least 85% identical to SEQ ID NO: 2584, at least 90% identical to SEQ ID NO: 2584, or at least 95% identical to SEQ ID NO: 2584. In some embodiments, the sense strand sequence comprises or consists of the sequence of SEQ ID NO: 2584, or a sense strand sequence thereof having 1, 2, 3, or 4 nucleoside substitutions, additions, or deletions. In some embodiments, the sense strand sequence comprises or consists of the sequence of SEQ ID NO: 2584, or a sense strand sequence thereof having 1 or 2 nucleoside substitutions, additions, or deletions. In some embodiments, the sense strand sequence comprises or consists of a sequence 100% identical to SEQ ID NO: 2584. The sense strand may comprise any modifications or modification pattern described herein. The sense strand may comprise a moiety such as a GalNAc moiety or a lipid moiety. In some embodiments, the siRNA comprises an antisense strand having a sequence in accordance with SEQ ID NO: 2646. In some embodiments, the antisense strand sequence comprises or consists of sequence at least 75% identical to SEQ ID NO: 2646, at least 80% identical to SEQ ID NO: 2646, at least 85% identical to SEQ ID NO: 2646, at least 90% identical to SEQ ID NO: 2646, or at least 95% identical to SEQ ID NO: 2646. In some embodiments, the antisense strand sequence comprises or consists of the sequence of SEQ ID NO: 2646, or an antisense strand sequence thereof having 1, 2, 3, or 4 nucleoside substitutions, additions, or deletions. In some embodiments, the antisense strand sequence comprises or consists of the sequence of SEQ ID NO: 2646, or an antisense strand sequence thereof having 1 or 2 nucleoside substitutions, additions, or deletions. In some embodiments, the antisense strand sequence comprises or consists of a sequence 100% identical to SEQ ID NO: 2646. The antisense strand may comprise any modifications or modification pattern described herein. The antisense strand may comprise a moiety such as a GalNAc moiety or a lipid moiety.

[0084] In some embodiments, the siRNA comprises a sense strand having a sequence in accordance with SEQ ID NO: 2604. In some embodiments, the sense strand sequence comprises or consists of sequence at least 75% identical to SEQ ID NO: 2604, at least 80% identical to SEQ ID NO: 2604, at least 85% identical to SEQ ID NO: 2604, at least 90% identical to SEQ ID NO: 2604, or at least 95% identical to SEQ ID NO: 2604. In some embodiments, the sense strand sequence comprises or consists of the sequence of SEQ ID NO: 2604, or a sense strand sequence thereof having 1, 2, 3, or 4 nucleoside substitutions, additions, or deletions. In some embodiments, the sense strand sequence comprises or consists of the sequence of SEQ ID NO: 2604, or a sense strand sequence thereof having 1 or 2 nucleoside substitutions, additions, or deletions. In some embodiments, the sense strand sequence comprises or consists of a sequence 100% identical to SEQ ID NO: 2604. The sense strand may comprise any modifications or modification pattern described herein. The sense strand may comprise a moiety such as a GalNAc moiety or a lipid moiety. In some embodiments, the siRNA comprises an antisense strand having a sequence in accordance with SEQ ID NO: 2666. In some embodiments, the antisense strand sequence comprises or consists of sequence at least 75% identical to SEQ ID NO: 2666, at least 80% identical to SEQ ID NO: 2666, at least 85% identical to SEQ ID NO: 2666, at least 90% identical to SEQ ID NO: 2666, or at least 95% identical to SEQ ID NO: 2666. In some embodiments, the antisense strand sequence comprises or consists of the sequence of SEQ ID NO: 2666, or an antisense strand sequence thereof having 1, 2, 3, or 4 nucleoside substitutions, additions, or deletions. In some embodiments, the antisense strand sequence comprises or consists of the sequence of SEQ ID NO: 2666, or an antisense strand sequence thereof having 1 or 2 nucleoside substitutions, additions, or deletions. In some embodiments, the antisense strand sequence comprises or consists of a sequence 100% identical to SEQ ID NO: 2666. The antisense strand may comprise any modifications or modification pattern described herein. The antisense strand may comprise a moiety such as a GalNAc moiety or a lipid moiety.

[0085] In some embodiments, the siRNA comprises a sense strand having a sequence in accordance with SEQ ID NO: 2551. In some embodiments, the sense strand sequence comprises or consists of sequence at least 75% identical to SEQ ID NO: 2551, at least 80% identical to SEQ ID NO: 2551, at least 85% identical to SEQ ID NO: 2551, at least 90% identical to SEQ ID NO: 2551, or at least 95% identical to SEQ ID NO: 2551. In some embodiments, the sense strand sequence comprises or consists of the sequence of SEQ ID NO: 2551, or a sense strand sequence thereof having 1, 2, 3, or 4 nucleoside substitutions, additions, or deletions. In some embodiments, the sense strand sequence comprises or consists of the sequence of SEQ ID NO: 2551, or a sense strand sequence thereof having 1 or 2 nucleoside substitutions, additions, or deletions. In some embodiments, the sense strand sequence comprises or consists of a sequence 100% identical to SEQ ID NO: 2551. The sense strand may comprise any modifications or modification pattern described herein. The sense strand may comprise a moiety such as a GalNAc moiety or a lipid moiety. In some embodiments, the siRNA comprises an antisense strand having a sequence in accordance with SEQ ID NO: 2613. In some embodiments, the antisense strand sequence comprises or consists of sequence at least 75% identical to SEQ ID NO: 2613, at least 80% identical to SEQ ID NO: 2613, at least 85% identical to SEQ ID NO: 2613, at least 90% identical to SEQ ID NO: 2613, or at least 95% identical to SEQ ID NO: 2613. In some embodiments, the antisense strand sequence comprises or consists of the sequence of SEQ ID NO: 2613, or an antisense strand sequence thereof having 1, 2, 3, or 4 nucleoside substitutions, additions, or deletions. In some embodiments, the antisense strand sequence comprises or consists of the sequence of SEQ ID NO: 2613, or an antisense strand sequence thereof having 1 or 2 nucleoside substitutions, additions, or deletions. In some embodiments, the antisense strand sequence comprises or consists of a sequence 100% identical to SEQ ID NO: 2613. The antisense strand may comprise any modifications or modification pattern described herein. The antisense strand may comprise a moiety such as a GalNAc moiety or a lipid moiety.

[0086] In some embodiments, the siRNA comprises a sense strand having a sequence in accordance with SEQ ID NO: 2681. In some embodiments, the sense strand sequence comprises or consists of sequence at least 75% identical to SEQ ID NO: 2681, at least 80% identical to SEQ ID NO: 2681, at least 85% identical to SEQ ID NO: 2681, at least 90% identical to SEQ ID NO: 2681, or at least 95% identical to SEQ ID NO: 2681. In some embodiments, the sense strand sequence comprises or consists of the sequence of SEQ ID NO: 2681, or a sense strand sequence thereof having 1, 2, 3, or 4 nucleoside substitutions, additions, or deletions. In some embodiments, the sense strand sequence comprises or consists of the sequence of SEQ ID NO: 2681, or a sense strand sequence thereof having 1 or 2 nucleoside substitutions, additions, or deletions. In some embodiments, the sense strand sequence comprises or consists of a sequence 100% identical to SEQ ID NO: 2681. The sense strand may comprise any modifications or modification pattern described herein. The sense strand may comprise a moiety such as a GalNAc moiety or a lipid moiety. In some embodiments, the siRNA comprises an antisense strand having a sequence in accordance with SEQ ID NO: 2863. In some embodiments, the antisense strand sequence comprises or consists of sequence at least 75% identical to SEQ ID NO: 2863, at least 80% identical to SEQ ID NO: 2863, at least 85% identical to SEQ ID NO: 2863, at least 90% identical to SEQ ID NO: 2863, or at least 95% identical to SEQ ID NO: 2863. In some embodiments, the antisense strand sequence comprises or consists of the sequence of SEQ ID NO: 2863, or an antisense strand sequence thereof having 1, 2, 3, or 4 nucleoside substitutions, additions, or deletions. In some embodiments, the antisense strand sequence comprises or consists of the sequence of SEQ ID NO: 2863, or an antisense strand sequence thereof having 1 or 2 nucleoside substitutions, additions, or deletions. In some embodiments, the antisense strand sequence comprises or consists of a sequence 100% identical to SEQ ID NO: 2863. The antisense strand may comprise any modifications or modification pattern described herein. The antisense strand may comprise a moiety such as a GalNAc moiety or a lipid moiety.

[0087] In some embodiments, the siRNA comprises a sense strand having a sequence in accordance with SEQ ID NO: 2683. In some embodiments, the sense strand sequence comprises or consists of sequence at least 75% identical to SEQ ID NO: 2683, at least 80% identical to SEQ ID NO: 2683, at least 85% identical to SEQ ID NO: 2683, at least 90% identical to SEQ ID NO: 2683, or at least 95% identical to SEQ ID NO: 2683. In some embodiments, the sense strand sequence comprises or consists of the sequence of SEQ ID NO: 2683, or a sense strand sequence thereof having 1, 2, 3, or 4 nucleoside substitutions, additions, or deletions. In some embodiments, the sense strand sequence comprises or consists of the sequence of SEQ ID NO: 2683, or a sense strand sequence thereof having 1 or 2 nucleoside substitutions, additions, or deletions. In some embodiments, the sense strand sequence comprises or consists of a sequence 100% identical to SEQ ID NO: 2683. The sense strand may comprise any modifications or modification pattern described herein. The sense strand may comprise a moiety such as a GalNAc moiety or a lipid moiety. In some embodiments, the siRNA comprises an antisense strand having a sequence in accordance with SEQ ID NO: 2865. In some embodiments, the antisense strand sequence comprises or consists of sequence at least 75% identical to SEQ ID NO: 2865, at least 80% identical to SEQ ID NO: 2865, at least 85% identical to SEQ ID NO: 2865, at least 90% identical to SEQ ID NO: 2865, or at least 95% identical to SEQ ID NO: 2865. In some embodiments, the antisense strand sequence comprises or consists of the sequence of SEQ ID NO: 2865, or an antisense strand sequence thereof having 1, 2, 3, or 4 nucleoside substitutions, additions, or deletions. In some embodiments, the antisense strand sequence comprises or consists of the sequence of SEQ ID NO: 2865, or an antisense strand sequence thereof having 1 or 2 nucleoside substitutions, additions, or deletions. In some embodiments, the antisense strand sequence comprises or consists of a sequence 100% identical to SEQ ID NO: 2865. The antisense strand may comprise any modifications or modification pattern described herein. The antisense strand may comprise a moiety such as a GalNAc moiety or a lipid moiety.

[0088] In some embodiments, the siRNA comprises a sense strand having a sequence in accordance with SEQ ID NO: 3284. In some embodiments, the sense strand sequence comprises or consists of sequence at least 75% identical to SEQ ID NO: 3284, at least 80% identical to SEQ ID NO: 3284, at least 85% identical to SEQ ID NO: 3284, at least 90% identical to SEQ ID NO: 3284, or at least 95% identical to SEQ ID NO: 3284. In some embodiments, the sense strand sequence comprises or consists of the sequence of SEQ ID NO: 3284, or a sense strand sequence thereof having 1, 2, 3, or 4 nucleoside substitutions, additions, or deletions. In some embodiments, the sense strand sequence comprises or consists of the sequence of SEQ ID NO: 3284, or a sense strand sequence thereof having 1 or 2 nucleoside substitutions, additions, or deletions. In some embodiments, the sense strand sequence comprises or consists of a sequence 100% identical to SEQ ID NO: 3284. The sense strand may comprise any modifications or modification pattern described herein. The sense strand may comprise a moiety such as a GalNAc moiety or a lipid moiety. In some embodiments, the siRNA comprises an antisense strand having a sequence in accordance with SEQ ID NO: 3295. In some embodiments, the antisense strand sequence comprises or consists of sequence at least 75% identical to SEQ ID NO: 3295, at least 80% identical to SEQ ID NO: 3295, at least 85% identical to SEQ ID NO: 3295, at least 90% identical to SEQ ID NO: 3295, or at least 95% identical to SEQ ID NO: 3295. In some embodiments, the antisense strand sequence comprises or consists of the sequence of SEQ ID NO: 3295, or an antisense strand sequence thereof having 1, 2, 3, or 4 nucleoside substitutions, additions, or deletions. In some embodiments, the antisense strand sequence comprises or consists of the sequence of SEQ ID NO: 3295, or an antisense strand sequence thereof having 1 or 2 nucleoside substitutions, additions, or deletions. In some embodiments, the antisense strand sequence comprises or consists of a sequence 100% identical to SEQ ID NO: 3295. The antisense strand may comprise any modifications or modification pattern described herein. The antisense strand may comprise a moiety such as a GalNAc moiety or a lipid moiety.

### B. ASOs

[0089] In some embodiments, the composition comprises an oligonucleotide that inhibits the expression of MTRES1, wherein the oligonucleotide comprises an antisense oligonucleotide (ASO). In some embodiments, the ASO is 12-30 nucleosides in length. In some embodiments, the ASO is 14-30 nucleosides in length. In some embodiments, the ASO is at least about 10, 11, 12, 13, 14, 15, 16, 17, 18, 19, 20, 21, 22, 23, 24, 25, 26, 27, 28, 29, or 30 nucleosides in length, or a range defined by any of the two aforementioned numbers. In some embodiments, the ASO is 15-25 nucleosides in length. In some embodiments, the ASO is 20 nucleosides in length.

[0090] In some embodiments, the composition comprises an oligonucleotide that inhibits the expression of MTRES1, wherein the oligonucleotide comprises an ASO about 12-30 nucleosides in length and comprising a nucleoside sequence complementary to about 12-30 contiguous nucleosides of a full-length human MTRES1 mRNA sequence such as SEQ ID NO: 2443; wherein (i) the oligonucleotide comprises a modification comprising a modified nucleoside and/or a modified internucleoside linkage, and/or (ii) the composition comprises a pharmaceutically acceptable carrier. In some embodiments, the ASO comprise a nucleoside sequence complementary to at least about 10, 11, 12, 13, 14, 15, 16, 17, 18, 19, 20, 21, 22, 23, 24, 25, 26, 27, 28, 29, 30, or more contiguous nucleosides of one of SEQ ID NO: 2443.

[0091] In some embodiments, the composition comprises an oligonucleotide that inhibits the expression of MTRES1, wherein the oligonucleotide comprises an ASO about 12-30 nucleosides in length and comprising a nucleoside sequence complementary to about 12-30 contiguous nucleosides of a full-length human MTRES1 mRNA sequence such as SEQ ID NO: 2462; wherein (i) the oligonucleotide comprises a modification comprising a modified nucleoside and/or a modified internucleoside linkage, and/or (ii) the composition comprises a pharmaceutically acceptable carrier. In some embodiments, the ASO comprise a nucleoside sequence complementary to at least about 10, 11, 12, 13, 14, 15, 16, 17, 18, 19, 20, 21, 22, 23, 24, 25, 26, 27, 28, 29, 30, or more contiguous nucleosides of one of SEQ ID NO: 2462.

### C. Modification Patterns

[0092] In some embodiments, the composition comprises an oligonucleotide that inhibits the expression of MTRES1, wherein the oligonucleotide comprises a modification comprising a modified nucleoside and/or a modified internucleoside linkage, and/or (ii) the composition comprises a pharmaceutically acceptable carrier. In some embodiments, the oligonucleotide comprises a modification comprising a modified nucleoside and/or a modified internucleoside linkage. In some embodiments, the oligonucleotide comprises a modified internucleoside linkage. In some embodiments, the modified internucleoside linkage comprises alkylphosphonate, phosphorothioate, methylphosphonate, phosphorodithioate, alkylphosphonothioate, phosphoramidate, carbamate, carbonate, phosphate triester, acetamidate, or carboxymethyl ester, or a combination thereof. In some embodiments, the modified internucleoside linkage comprises one or more phosphorothioate linkages. A phosphorothioate may include a nonbridging oxygen atom in a phosphate backbone of the oligonucleotide that is replaced by sulfur. Modified internucleoside linkages may be included in siRNAs or ASOs. Benefits of the modified internucleoside linkage may include decreased toxicity or improved pharmacokinetics.

[0093] In some embodiments, the composition comprises an oligonucleotide that inhibits the expression of MTRES1, wherein the oligonucleotide comprises a modified internucleoside linkage, wherein the oligonucleotide comprises 1, 2, 3, 4, 5, 6, 7, 8, 9, 10, 11, 12, 13, 14, 15, 16, 17, 18, 19, or 20 modified internucleoside linkages, or a range of modified internucleoside linkages defined by any two of the aforementioned numbers. In some embodiments, the oligonucleotide comprises no more than 18 modified internucleoside linkages. In some embodiments, the oligonucleotide comprises no more than 20 modified internucleoside linkages. In some embodiments, the oligonucleotide comprises 2 or more modified internucleoside linkages, 3 or more modified internucleoside linkages, 4 or more modified internucleoside linkages, 5 or more modified internucleoside linkages, 6 or more modified internucleoside linkages, 7 or more modified internucleoside linkages, 8 or more modified internucleoside linkages, 9 or more modified internucleoside linkages, 10 or more modified internucleoside linkages, 11 or more modified internucleoside linkages, 12 or more modified internucleoside linkages, 13 or more modified internucleoside linkages, 14 or more modified internucleoside linkages, 15 or more modified internucleoside linkages, 16 or more modified internucleoside linkages, 17 or more modified internucleoside linkages, 18 or more modified internucleoside linkages, 19 or more modified internucleoside linkages, or 20 or more modified internucleoside linkages.

[0094] In some embodiments, the composition comprises an oligonucleotide that inhibits the expression of MTRES1, wherein the oligonucleotide comprises the modified nucleoside. In some embodiments, the modified nucleoside comprises a locked nucleic acid (LNA), hexitol nucleic acid (HNA), cyclohexene nucleic acid (CeNA), 2′-O-methoxyethyl, 2′-O-alkyl, 2′-O-allyl, 2′-fluoro, or 2′-deoxy, or a combination thereof. In some embodiments, the modified nucleoside comprises an LNA. In some embodiments, the modified nucleoside comprises a 2′,4′ constrained ethyl nucleic acid. In some embodiments, the modified nucleoside comprises HLA. In some embodiments, the modified nucleoside comprises CeNA. In some embodiments, the modified nucleoside comprises a 2′-O-methoxyethyl group (“MOE”). In some embodiments, the modified nucleoside comprises a 2′-O-alkyl group. In some embodiments, the modified nucleoside comprises a 2′-O-allyl group. In some embodiments, the modified nucleoside comprises a 2′-fluoro group. In some embodiments, the modified nucleoside comprises a 2′-deoxy group. In some embodiments, the modified nucleoside comprises a 2′-O-methyl nucleoside, 2′-deoxyfluoro nucleoside, 2′-O—N-methylacetamido (2′-O-NMA) nucleoside, a 2′-O-dimethylaminoethoxyethyl(2′-O-DMAEOE) nucleoside, 2′-O-aminopropyl(2′-O-AP) nucleoside, or 2′-ara-F, or a combination thereof. In some embodiments, the modified nucleoside comprises a 2′-O-methyl nucleoside. In some embodiments, the modified nucleoside comprises a 2′-deoxyfluoro nucleoside. In some embodiments, the modified nucleoside comprises a 2′-O-NMA nucleoside. In some embodiments, the modified nucleoside comprises a 2′-O-DMAEOE nucleoside. In some embodiments, the modified nucleoside comprises a 2′-O-aminopropyl(2′-O-AP) nucleoside. In some embodiments, the modified nucleoside comprises 2′-ara-F. In some embodiments, the modified nucleoside comprises one or more 2′fluoro modified nucleosides. In some embodiments, the modified nucleoside comprises a 2′-O-alkyl modified nucleoside. In some embodiments, the modified nucleoside comprises a 2′-O-methyl inosine nucleoside. In some embodiments, the modified nucleoside comprises an unlocked nucleic acid. Benefits of the modified nucleoside may include decreased toxicity or improved pharmacokinetics.

[0095] In some embodiments, the modified nucleoside comprises an unlocked nucleic acid. An unlocked nucleic acid may comprise the following structure:

[chemical structure]

wherein the base can be any pyrimidine or purine.

[0096] In some embodiments, the oligonucleotide comprises a modified nucleoside. In some embodiments, the modified nucleoside comprises a locked nucleic acid and an abasic site:

[chemical structure]

where J and K are independently an H or a 3′ or 5′ linkage to a nucleotide via a phosphodiester or phosphorothioate bond.

[0097] In some embodiments, the oligonucleotide comprises a phosphate mimic. In some embodiments, the phosphate mimic comprises methylphosphonate. An example of a nucleotide that comprises a methylphosphonate is shown below:

[chemical structure]

(5′ methylphosphonate 2′-O-Methyl Uridine).

[0098] In some embodiments, the oligonucleotide comprises a duplex consisting of 21-36 nucleotide single strands with base pairing between 17-25 of the base pairs. In some embodiments, the duplex comprises blunt-ends at the 5′ or 3′ ends of each strand. One strand (antisense strand) is complementary to a target mRNA. Each end of the antisense strand has one to five phosphorothioate bonds. The 5′ end has an optional phosphate mimic such as a vinyl phosphonate. In some embodiments, the oligonucleotide is used to knock down a target mRNA or a target protein. In some embodiments, the sense strand has the same sequence as the target mRNA. In some embodiments, there are 1-5 phosphorothioates at the 5′ and 3′ ends.

[0099] In some embodiments, the oligonucleotide comprises 1, 2, 3, 4, 5, 6, 7, 8, 9, 10, 11, 12, 13, 14, 15, 16, 17, 18, 19, 20, or 21 modified nucleosides, or a range of nucleosides defined by any two of the aforementioned numbers. In some embodiments, the oligonucleotide comprises no more than 19 modified nucleosides. In some embodiments, the oligonucleotide comprises no more than 21 modified nucleosides. In some embodiments, the oligonucleotide comprises 2 or more modified nucleosides, 3 or more modified nucleosides, 4 or more modified nucleosides, 5 or more modified nucleosides, 6 or more modified nucleosides, 7 or more modified nucleosides, 8 or more modified nucleosides, 9 or more modified nucleosides, 10 or more modified nucleosides, 11 or more modified nucleosides, 12 or more modified nucleosides, 13 or more modified nucleosides, 14 or more modified nucleosides, 15 or more modified nucleosides, 16 or more modified nucleosides, 17 or more modified nucleosides, 18 or more modified nucleosides, 19 or more modified nucleosides, 20 or more modified nucleosides, or 21 or more modified nucleosides.

[0100] In some embodiments, the sense strand comprises at least three modified nucleosides, wherein the three modifications comprise a 2′-fluoro modified nucleoside, a 2′-O-methyl modified nucleoside, and 2′-O-methoxyethyl. In some embodiments, the sense strand comprises at least two modified nucleosides, wherein the two modifications comprise a 2′-fluoro modified nucleoside, a 2′-O-methyl modified nucleoside, and 2′-O-methoxyethyl. In some embodiments, each nucleoside of the sense strand comprises a modified nucleoside, wherein the modified nucleosides are selected from the group consisting of a 2′-fluoro modified nucleoside, a 2′-O-methyl modified nucleoside, and 2′-O-methoxyethyl. In some embodiments, the sense strand comprises at least a 2′-fluoro modified nucleoside, a 2′-O-methyl modified nucleoside, and 2′-O-methoxyethyl.

[0101] In some embodiments, the antisense strand is combination of 2′-fluoro and 2′-O-Methyl modifications. In some embodiments, each nucleoside of the antisense strand comprises a modified nucleoside, wherein the modified nucleosides are selected from the group consisting of a 2′-fluoro modified nucleoside and a 2′-O-methyl modified nucleoside. In some embodiments, the sense strand comprises at least a 2′-fluoro modified nucleoside and a 2′-O-methyl modified nucleoside.

[0102] The oligonucleotide may include purines. Examples of purines include adenine (A), inosine (I), or guanine (G), or modified versions thereof. The oligonucleotide may include pyrimidines. Examples of pyrimidines include cytosine (C), thymine (T), or uracil (U), or modified versions thereof.

[0103] In some embodiments, the sense strand comprises purines and pyrimidines. In some embodiments, all purine nucleosides comprise 2′-fluoro, and all pyrimidine nucleosides are modified with a mixture of 2′-O-methyl and 2′-O-methoxyethyl. In some embodiments, all purine nucleosides comprise 2′-O-methyl, and all pyrimidine nucleosides are modified with a mixture of 2′-fluoro and 2′-O-methoxyethyl. In some embodiments, all purine nucleosides comprise 2′-O-methoxyethyl, and all pyrimidine nucleosides are modified with a mixture of 2′-fluoro and 2′-O-methyl. In some embodiments, all pyrimidine nucleosides comprise 2′-fluoro, and all purine nucleosides are modified with a mixture of 2′-O-methyl and 2′-O-methoxyethyl. In some embodiments, all pyrimidine nucleosides comprise 2′-O-methyl, and all purine nucleosides are modified with a mixture of 2′-fluoro and 2′-O-methoxyethyl. In some embodiments, all pyrimidine nucleosides comprise 2′-O-methoxyethyl, and all purine nucleosides are modified with a mixture of 2′-fluoro and 2′-O-methyl. In some embodiments, the sense strand may include a 2′-deoxy nucleoside.

[0104] In some embodiments, at least one nucleotide at position 4 or 5 of the sense strand comprises a 2′-O-methoxyethyl modified nucleoside. In some embodiments, at least one nucleotide of the sense strand from position 6 to 9 comprise a 2′-fluoro-modified nucleoside. In some embodiments, at least two nucleotides of the sense strand at position 6 to 9 comprise a 2′-fluoro-modified nucleoside. In some embodiments, at least three nucleotides of the sense strand at positions 6 to 9 comprise a 2′-fluoro-modified nucleoside. In some embodiments, each nucleotide from positions 6 to 9 of the sense strand comprise a 2′-fluoro-modified nucleoside. In some embodiments, at least one nucleotide at position 16 to 20 of the sense strand comprises a 2′-O-methyl modified nucleoside. In some embodiments, at least two nucleotides at position 16 to 20 of the sense strand comprise a 2′-O-methyl modified nucleoside. In some embodiments, at least three nucleotides at position 16 to 20 of the sense strand comprise a 2′-O-methyl modified nucleoside. In some embodiments, at least four nucleotides at position 16 to 20 of the sense strand comprise a 2′-O-methyl modified nucleoside. In some embodiments, all nucleotides at position 16 to 20 of the sense strand comprise a 2′-O-methyl modified nucleoside.

[0105] In some embodiments, any of the following is true with regards to the antisense strand: all purine nucleosides comprise 2′-fluoro, and all pyrimidine nucleosides are modified with a mixture of 2′-fluoro and 2′-O-methyl; all purine nucleosides comprise 2′-O-methyl, and all pyrimidine nucleosides are modified with a mixture of 2′-fluoro and 2′-O-methyl; all purine nucleosides comprise 2′-O-methyl, and all pyrimidine nucleosides comprise 2′-fluoro; all pyrimidine nucleosides comprise 2′-fluoro, and all purine nucleosides are modified with a mixture of 2′-fluoro and 2′-O-methyl; all pyrimidine nucleosides comprise 2′-O-methyl, and all purine nucleosides are modified with a mixture of 2′-fluoro and 2′-O-methyl; or all pyrimidine nucleosides comprise 2′-O-methyl, and all purine nucleosides comprise 2′-fluoro. In some embodiments, all purine nucleosides comprise 2′-fluoro, and all pyrimidine nucleosides are modified with a mixture of 2′-fluoro and 2′-O-methyl. In some embodiments, all purine nucleosides comprise 2′-O-methyl, and all pyrimidine nucleosides are modified with a mixture of 2′-fluoro and 2′-O-methyl; all purine nucleosides comprise 2′-O-methyl, and all pyrimidine nucleosides comprise 2′-fluoro. In some embodiments, all pyrimidine nucleosides comprise 2′-fluoro, and all purine nucleosides are modified with a mixture of 2′-fluoro and 2′-O-methyl; all pyrimidine nucleosides comprise 2′-O-methyl, and all purine nucleosides are modified with a mixture of 2′-fluoro and 2′-O-methyl. In some embodiments, all pyrimidine nucleosides comprise 2′-O-methyl, and all purine nucleosides comprise 2′-fluoro.

[0106] Some embodiments include an oligonucleotide comprising: a sense strand having a 5′ end, a 3′ end and a region of complementarity with an antisense strand; an antisense strand having a 5′end, a 3′end and a region of complementarity with the sense strand and a region of complementarity to an mRNA target; an overhang region at the 3′ end of the sense strand having at least 3 contiguous phosphorothioated nucleotides; and an overhang region at the 3′ end of the antisense strand having at least 3 contiguous phosphorothioated nucleotides.

[0107] Some embodiments include an oligonucleotide comprising: a sense strand having a 5′ end, a 3′ end and a region of complementarity with an antisense strand; an antisense strand having a 5′end, a 3′end and a region of complementarity with the sense strand and a region of complementarity to an mRNA target; and an overhang region at the 3′ end of the sense strand having at least 3 contiguous phosphorothioated nucleotides.

[0108] In some embodiments, the oligonucleotide includes two to eight oligonucleotides attached through a linker. The linker may be hydrophobic. In some embodiments, the oligonucleotides independently have substantial chemical stabilization (e.g., at least 40% of the constituent bases are chemically-modified). In some embodiments, the oligonucleotides have full chemical stabilization (i.e., all of the constituent bases are chemically-modified). In some embodiments, the oligonucleotide includes one or more single-stranded phosphorothioated tails, each independently having two to twenty nucleotides. In some embodiments, each single-stranded tail has eight to ten nucleotides.

[0109] In certain embodiments, a compound (e.g. moiety attached to the oligonucleotide) includes three properties: (1) a branched structure, (2) full metabolic stabilization, and (3) the presence of a single-stranded tail comprising phosphorothioate linkers. In a particular embodiment, a compound has 2 or 3 branches. The increased overall size of the branched structures promote increased uptake. Also, without being bound by a particular theory of activity, multiple adjacent branches (e.g., 2 or 3) allow each branch to act cooperatively and thus dramatically enhance rates of internalization, trafficking and release. The compound may include an oligonucleotide described herein, as part of the compound.

[0110] In certain embodiments, a compound includes the following properties: (1) two or more branched oligonucleotides linked via a non-natural linker (2) substantially chemically stabilized, e.g., wherein more than 40%, optimally 100%, of oligonucleotides are chemically modified (e.g., no RNA and optionally no DNA); and (3) phosphorothioated single oligonucleotides containing at least 3, optimally 5-20 phosphorothioated bonds.

[0111] In some embodiments, the oligonucleotide comprises a phosphate at a 5′ end. In some embodiments, the oligonucleotide comprises a phosphate at a 3′ end. In some embodiments, the oligonucleotide comprises a phosphate mimic at a 5′ end. In some embodiments, the oligonucleotide comprises a phosphate mimic at a 3′ end.

[0112] The oligonucleotide may include purines. Examples of purines include adenine (A), inosine (I), or guanine (G), or modified versions thereof. The oligonucleotide may include pyrimidines. Examples of pyrimidines include cytosine (C), thymine (T), or uracil (U), or modified versions thereof.

[0113] In some embodiments, purines of the oligonucleotide comprise 2′-fluoro modified purines. In some embodiments, purines of the oligonucleotide comprise 2′-O-methyl modified purines. In some embodiments, purines of the oligonucleotide comprise a mixture of 2′-fluoro and 2′-O-methyl modified purines. In some embodiments, all purines of the oligonucleotide comprise 2′-fluoro modified purines. In some embodiments, all purines of the oligonucleotide comprise 2′-O-methyl modified purines. In some embodiments, all purines of the oligonucleotide comprise a mixture of 2′-fluoro and 2′-O-methyl modified purines. 2′-O-methyl may include 2′-O-methyl. Where 2′-O-methyl modifications are described, it is contemplated that a 2′-methyl modification may be included, and vice versa.

[0114] In some embodiments, pyrimidines of the oligonucleotide comprise 2′-fluoro modified pyrimidines. In some embodiments, pyrimidines of the oligonucleotide comprise 2′-O-methyl modified pyrimidines. In some embodiments, pyrimidines of the oligonucleotide comprise a mixture of 2′-fluoro and 2′-O-methyl modified pyrimidines. In some embodiments, all pyrimidines of the oligonucleotide comprise 2′-fluoro modified pyrimidines. In some embodiments, all pyrimidines of the oligonucleotide comprise 2′-O-methyl modified pyrimidines. In some embodiments, all pyrimidines of the oligonucleotide comprise a mixture of 2′-fluoro and 2′-O-methyl modified pyrimidines.

[0115] In some embodiments, purines of the oligonucleotide comprise 2′-fluoro modified purines, and pyrimidines of the oligonucleotide comprise a mixture of 2′-fluoro and 2′-O-methyl modified pyrimidines. In some embodiments, purines of the oligonucleotide comprise 2′-O-methyl modified purines, and pyrimidines of the oligonucleotide comprise a mixture of 2′-fluoro and 2′-O-methyl modified pyrimidines. In some embodiments, purines of the oligonucleotide comprise 2′-fluoro modified purines, and pyrimidines of the oligonucleotide comprise 2′-O-methyl modified pyrimidines. In some embodiments, purines of the oligonucleotide comprise 2′-O-methyl modified purines, and pyrimidines of the oligonucleotide comprise 2′-fluoro modified pyrimidines. In some embodiments, pyrimidines of the oligonucleotide comprise 2′-fluoro modified pyrimidines, and purines of the oligonucleotide comprise a mixture of 2′-fluoro and 2′-O-methyl modified purines. In some embodiments, pyrimidines of the oligonucleotide comprise 2′-O-methyl modified pyrimidines, and purines of the oligonucleotide comprise a mixture of 2′-fluoro and 2′-O-methyl modified purines. In some embodiments, pyrimidines of the oligonucleotide comprise 2′-fluoro modified pyrimidines, and purines of the oligonucleotide comprise 2′-O-methyl modified purines. In some embodiments, pyrimidines of the oligonucleotide comprise 2′-O-methyl modified pyrimidines, and purines of the oligonucleotide comprise 2′-fluoro modified purines.

[0116] In some embodiments, all purines of the oligonucleotide comprise 2′-fluoro modified purines, and all pyrimidines of the oligonucleotide comprise a mixture of 2′-fluoro and 2′-O-methyl modified pyrimidines. In some embodiments, all purines of the oligonucleotide comprise 2′-O-methyl modified purines, and all pyrimidines of the oligonucleotide comprise a mixture of 2′-fluoro and 2′-O-methyl modified pyrimidines. In some embodiments, all purines of the oligonucleotide comprise 2′-fluoro modified purines, and all pyrimidines of the oligonucleotide comprise 2′-O-methyl modified pyrimidines. In some embodiments, all purines of the oligonucleotide comprise 2′-O-methyl modified purines, and all pyrimidines of the oligonucleotide comprise 2′-fluoro modified pyrimidines. In some embodiments, all pyrimidines of the oligonucleotide comprise 2′-fluoro modified pyrimidines, and all purines of the oligonucleotide comprise a mixture of 2′-fluoro and 2′-O-methyl modified purines. In some embodiments, all pyrimidines of the oligonucleotide comprise 2′-O-methyl modified pyrimidines, and all purines of the oligonucleotide comprise a mixture of 2′-fluoro and 2′-O-methyl modified purines. In some embodiments, all pyrimidines of the oligonucleotide comprise 2′-fluoro modified pyrimidines, and all purines of the oligonucleotide comprise 2′-O-methyl modified purines. In some embodiments, all pyrimidines of the oligonucleotide comprise 2′-O-methyl modified pyrimidines, and all purines of the oligonucleotide comprise 2′-fluoro modified purines.

[0117] In some cases, the oligonucleotide comprises a particular modification pattern. In some embodiments, position 9 counting from the 5′ end of the of a strand of the oligonucleotide may have a 2′F modification. In some embodiments, when position 9 of a strand of the oligonucleotide is a pyrimidine, then all purines in a strand of the oligonucleotide have a 2′OMe modification. In some embodiments, when position 9 is the only pyrimidine between positions 5 and 11 of the sense stand, then position 9 is the only position with a 2′F modification in a strand of the oligonucleotide. In some embodiments, when position 9 and only one other base between positions 5 and 11 of a strand of the oligonucleotide are pyrimidines, then both of these pyrimidines are the only two positions with a 2′F modification in a strand of the oligonucleotide. In some embodiments, when position 9 and only two other bases between positions 5 and 11 of a strand of the oligonucleotide are pyrimidines, and those two other pyrimidines are in adjacent positions so that there would be not three 2′F modifications in a row, then any combination of 2′F modifications can be made that give three 2′F modifications in total. In some embodiments, when there are more than 2 pyrimidines between positions 5 and 11 of a strand of the oligonucleotide, then all combinations of pyrimidines having the 2′F modification are allowed that have three to five 2′F modifications in total, provided that a strand of the oligonucleotide does not have three 2′F modifications in a row. In some cases, a strand of the oligonucleotide of any of the siRNAs comprises a modification pattern which conforms to any or all of these a strand of the oligonucleotide rules.

[0118] In some embodiments, when position 9 of a strand of the oligonucleotide is a purine, then all purines in a strand of the oligonucleotide have a 2′OMe modification. In some embodiments, when position 9 is the only purine between positions 5 and 11 of the sense stand, then position 9 is the only position with a 2′F modification in a strand of the oligonucleotide. In some embodiments, when position 9 and only one other base between positions 5 and 11 of a strand of the oligonucleotide are purines, then both of these purines are the only two positions with a 2′F modification in a strand of the oligonucleotide. In some embodiments, when position 9 and only two other bases between positions 5 and 11 of a strand of the oligonucleotide are purines, and those two other purines are in adjacent positions so that there would be not three 2′F modifications in a row, then any combination of 2′F modifications can be made that give three 2′F modifications in total. In some embodiments, when there are more than 2 purines between positions 5 and 11 of a strand of the oligonucleotide, then all combinations of purines having the 2′F modification are allowed that have three to five 2′F modifications in total, provided that a strand of the oligonucleotide does not have three 2′F modifications in a row. In some cases, a strand of the oligonucleotide of any of the siRNAs comprises a modification pattern which conforms to any or all of these a strand of the oligonucleotide rules.

[0119] In some cases, position 9 of a strand of the oligonucleotide can be a 2′deoxy. In these cases, 2′F and 2′OMe modifications may occur at the other positions of a strand of the oligonucleotide. In some cases, a strand of the oligonucleotide of any of the siRNAs comprises a modification pattern which conforms to these a strand of the oligonucleotide rules.

[0120] In some embodiments, position nine of the sense strand comprises a 2′-fluoro-modified pyrimidine. In some embodiments, all purines of the sense strand comprise 2′-O-methyl modified purines. In some embodiments, 1, 2, 3, 4, or 5 pyrimidines between positions 5 and 11 comprise a 2′fluoro-modified pyrimidine, provided there are not three 2′-fluoro-modified pyrimidines in a row. In some embodiments, the odd-numbered positions of the antisense strand comprise 2′-O-methyl modified nucleotides. In some embodiments, the even-numbered positions of the antisense strand comprise 2′fluoro-modified nucleotides and unmodified deoxyribonucleotide. In some embodiments, the even-numbered positions of the antisense strand comprise 2′fluoro-modified nucleotides, 2′-O-methyl modified nucleotides and unmodified deoxyribonucleotide. In some embodiments, position nine of the sense strand comprises a 2′-fluoro-modified pyrimidine; all purines of the sense strand comprises 2′-O-methyl modified purines; 1, 2, 3, 4, or 5 pyrimidines between positions 5 and 11 comprise a 2′fluoro-modified pyrimidine, provided there are not three 2′-fluoro-modified pyrimidines in a row; the odd-numbered positions of the antisense strand comprise 2′-O-methyl modified nucleotides; and the even-numbered positions of the antisense strand comprise 2′fluoro-modified nucleotides and unmodified deoxyribonucleotides.

[0121] In some embodiments, position nine of the sense strand comprises a 2′-fluoro-modified purine. In some embodiments, all pyrimidines of the sense strand comprise 2′-O-methyl modified purines. In some embodiments, 1, 2, 3, 4, or 5 purines between positions 5 and 11 comprise a 2′fluoro-modified purine, provided there are not three 2′-fluoro-modified purine in a row. In some embodiments, the odd-numbered positions of the antisense strand comprise 2′-O-methyl modified nucleotides. In some embodiments, the even-numbered positions of the antisense strand comprise 2′fluoro-modified nucleotides and unmodified deoxyribonucleotide. In some embodiments, the even-numbered positions of the antisense strand comprise 2′fluoro-modified nucleotides, 2′-O-methyl modified nucleotides and unmodified deoxyribonucleotide. In some embodiments, position nine of the sense strand comprises a 2′-fluoro-modified purine; all pyrimidine of the sense strand comprises 2′-O-methyl modified pyrimidines; 1, 2, 3, 4, or 5 purines between positions 5 and 11 comprise a 2′fluoro-modified purines, provided there are not three 2′-fluoro-modified purines in a row; the odd-numbered positions of the antisense strand comprise 2′-O-methyl modified nucleotides; and the even-numbered positions of the antisense strand comprise 2′fluoro-modified nucleotides and unmodified deoxyribonucleotides. In some embodiments, there are not three 2′-fluoro-modified purines in a row. In some embodiments, there are not three 2′-fluoro-modified pyrimidines in a row.

[0122] In some embodiments, position nine of the sense strand comprises an unmodified deoxyribonucleotide. In some embodiments, positions 5, 7, and 8 of the sense strand comprise 2′fluoro-modified nucleotides. In some embodiments, all pyrimidines in positions 10 to 21 of the sense strand comprise 2′-O-methyl modified pyrimidines and all purines in positions 10 to 21 of the comprise 2′-O-methyl modified purines or 2′fluoro-modified purines. In some embodiments, the odd-numbered positions of the antisense strand comprise 2′-O-methyl modified nucleotides. In some embodiments, the even-numbered positions of the antisense strand comprise 2′fluoro-modified nucleotides and unmodified deoxyribonucleotides. In some embodiments, the even-numbered positions of the antisense strand comprise 2′fluoro-modified nucleotides, 2′-O-methyl modified nucleotides and unmodified deoxyribonucleotides. In some embodiments, position nine of the sense strand comprises an unmodified deoxyribonucleotide; positions 5, 7, and 8 of the sense strand comprise 2′fluoro-modified nucleotides; all pyrimidines in positions 10 to 21 of the sense strand comprise 2′-O-methyl modified pyrimidines and all purines in positions 10 to 21 of the comprise 2′-O-methyl modified purines or 2′fluoro-modified purines; the odd-numbered positions of the antisense strand comprise 2′-O-methyl modified nucleotides; and the even-numbered positions of the antisense strand comprise 2′fluoro-modified nucleotides and unmodified deoxyribonucleotides.

[0123] In some embodiments, position nine of the sense strand comprises an unmodified deoxyribonucleotide. In some embodiments, positions 5, 7, and 8 of the sense strand comprise 2′fluoro-modified nucleotides. In some embodiments, all purines in positions 10 to 21 of the sense strand comprise 2′-O-methyl modified purines and all pyrimidines in positions 10 to 21 of the comprise 2′-O-methyl modified pyrimidines or 2′fluoro-modified pyrimidines. In some embodiments, the odd-numbered positions of the antisense strand comprise 2′-O-methyl modified nucleotides. In some embodiments, the even-numbered positions of the antisense strand comprise 2′fluoro-modified nucleotides and unmodified deoxyribonucleotides. In some embodiments, the even-numbered positions of the antisense strand comprise 2′fluoro-modified nucleotides, 2′-O-methyl modified nucleotides and unmodified deoxyribonucleotides. In some embodiments, position nine of the sense strand comprises an unmodified deoxyribonucleotide; positions 5, 7, and 8 of the sense strand comprise 2′fluoro-modified nucleotides; all purines in positions 10 to 21 of the sense strand comprise 2′-O-methyl modified purines and all pyrimidines in positions 10 to 21 of the comprise 2′-O-methyl modified pyrimidines or 2′fluoro-modified pyrimidines; the odd-numbered positions of the antisense strand comprise 2′-O-methyl modified nucleotides; and the even-numbered positions of the antisense strand comprise 2′fluoro-modified nucleotides and unmodified deoxyribonucleotide.

[0124] In some embodiments, the moiety includes a negatively charged group attached at a 5′ end of the oligonucleotide. This may be referred to as a 5′-end group. In some embodiments, the negatively charged group is attached at a 5′ end of an antisense strand of an siRNA disclosed herein. The 5′-end group may be or include a 5′-end phosphorothioate, 5′-end phosphorodithioate, 5′-end vinylphosphonate (5′-VP), 5′-end methylphosphonate, 5′-end cyclopropyl phosphonate, or a 5′-deoxy-5′-C-malonyl. The 5′-end group may comprise 5′-VP. In some embodiments, the 5′-VP comprises a trans-vinylphosphonate or cis-vinylphosphonate. The 5′-end group may include an extra 5′ phosphate. A combination of 5′-end groups may be used.

[0125] In some embodiments, the oligonucleotide includes a negatively charged group. The negatively charged group may aid in cell or tissue penetration. The negatively charged group may be attached at a 5′ or 3′ end (e.g. a 5′ end) of the oligonucleotide. This may be referred to as an end group. The end group may be or include a phosphorothioate, phosphorodithioate, vinylphosphonate, methylphosphonate, cyclopropyl phosphonate, or a deoxy-C-malonyl. The end group may include an extra 5′ phosphate such as an extra 5′ phosphate. A combination of end groups may be used.

[0126] In some embodiments, the oligonucleotide includes a phosphate mimic. In some embodiments, the phosphate mimic comprises vinyl phosphonate. In some embodiments, the vinyl phosphonate comprises a trans-vinylphosphonate. In some embodiments, the vinyl phosphonate comprises a cis-vinylphosphonate. An example of a nucleotide that includes a vinyl phosphonate is shown below.

[chemical structure]

### 5′ vinylphosphonate 2′-O Methyl Uridine

[0127] In some embodiments, the vinyl phosphonate increases the stability of the oligonucleotide. In some embodiments, the vinyl phosphonate increases the accumulation of the oligonucleotide in tissues. In some embodiments, the vinyl phosphonate protects the oligonucleotide from an exonuclease or a phosphatase. In some embodiments, the vinyl phosphonate improves the binding affinity of the oligonucleotide with the siRNA processing machinery.

[0128] In some embodiments, the oligonucleotide includes 1 vinyl phosphonate. In some embodiments, the oligonucleotide includes 2 vinyl phosphonates. In some embodiments, the oligonucleotide includes 3 vinyl phosphonates. In some embodiments, the oligonucleotide includes 4 vinyl phosphonates. In some embodiments, the antisense strand of the oligonucleotide comprises a vinyl phosphonate at the 5′ end. In some embodiments, the antisense strand of the oligonucleotide comprises a vinyl phosphonate at the 3′ end. In some embodiments, the sense strand of the oligonucleotide comprises a vinyl phosphonate at the 5′ end. In some embodiments, the sense strand of the oligonucleotide comprises a vinyl phosphonate at the 3′ end.

### 1. Hydrophobic Moieties

[0129] In some embodiments, the composition comprises an oligonucleotide that inhibits the expression of MTRES1, wherein the oligonucleotide comprises a moiety attached at a 3′ or 5′ terminus of the oligonucleotide. Examples of moieties include a hydrophobic moiety or a sugar moiety, or a combination thereof. In some embodiments, the oligonucleotide is an siRNA having a sense strand, and the moiety is attached to a 5′ end of the sense strand. In some embodiments, the oligonucleotide is an siRNA having a sense strand, and the moiety is attached to a 3′ end of the sense strand. In some embodiments, the oligonucleotide is an siRNA having an antisense strand, and the moiety is attached to a 5′ end of the antisense strand. In some embodiments, the oligonucleotide is an siRNA having an antisense strand, and the moiety is attached to a 3′ end of the antisense strand. In some embodiments, the oligonucleotide is an ASO, and the moiety is attached to a 5′ end of the ASO. In some embodiments, the oligonucleotide is an ASO, and the moiety is attached to a 3′ end of the ASO.

[0130] In some embodiments, the composition comprises an oligonucleotide that inhibits the expression of MTRES1, wherein the oligonucleotide comprises a hydrophobic moiety. The hydrophobic moiety may be attached at a 3′ or 5′ terminus of the oligonucleotide. The hydrophobic moiety may include a lipid such as a fatty acid. The hydrophobic moiety may include a hydrocarbon. The hydrocarbon may be linear. The hydrocarbon may be non-linear. The hydrophobic moiety may include a lipid moiety or a cholesterol moiety, or a combination thereof.

[0131] In some embodiments, the composition comprises an oligonucleotide that inhibits the expression of MTRES1, wherein the oligonucleotide comprises a lipid attached at a 3′ or 5′ terminus of the oligonucleotide. In some embodiments, the lipid comprises cholesterol, myristoyl, palmitoyl, stearoyl, lithocholoyl, docosanoyl, docosahexaenoyl, myristyl, palmityl stearyl, or α-tocopherol, or a combination thereof.

[0132] In some embodiments, the oligonucleotide comprises a lipophilic moiety attached at a 3′ or 5′ terminus of the oligonucleotide. In some embodiments, the lipophilic moiety comprises cholesterol, retinoic acid, cholic acid, adamantane acetic acid, 1-pyrene butyric acid, dihydrotestosterone, 1,3-bis-O(hexadecyl)glycerol, geranyloxyhexyanol, hexadecylglycerol, borneol, menthol, 1,3-propanediol, a heptadecyl group, palmitic acid, myristic acid, O3-(oleoyl) lithocholic acid, O3-(oleoyl) cholenic acid, ibuprofen, naproxen, dimethoxytrityl, or phenoxazine, or a combination thereof. The lipophilic moiety may include a steroid such as cholesterol. The lipophilic moiety may include retinoic acid. The lipophilic moiety may include cholic acid. The lipophilic moiety may include adamantane acetic acid. The lipophilic moiety may include 1-pyrene butyric acid. The lipophilic moiety may include dihydrotestosterone. The lipophilic moiety may include 1,3-bis-O(hexadecyl)glycerol. The lipophilic moiety may include geranyloxyhexyanol. The lipophilic moiety may include hexadecylglycerol. The lipophilic moiety may include borneol. The lipophilic moiety may include menthol. The lipophilic moiety may include 1,3-propanediol. The lipophilic moiety may include a heptadecyl group. The lipophilic moiety may include palmitic acid. The lipophilic moiety may include myristic acid. The lipophilic moiety may include 03-(oleoyl) lithocholic acid. The lipophilic moiety may include O3-(oleoyl) cholenic acid. The lipophilic moiety may include ibuprofen. The lipophilic moiety may include naproxen. The lipophilic moiety may include dimethoxytrityl. The lipophilic moiety may include phenoxazine.

[0133] In some embodiments, the lipophilic moiety comprises a hydrocarbon chain. The hydrocarbon chain may comprise or consist of a C₄-C₃₀ hydrocarbon chain. In some embodiments, the lipophilic moiety comprises a lipid.

[0134] In some embodiments, the oligonucleotide includes one or more lipophilic monomers, containing one or more lipophilic moieties, conjugated to one or more positions on at least one strand of the oligonucleotide, optionally via a linker or carrier. For instance, some embodiments provide an oligonucleotide comprising: an antisense strand which is complementary to a target gene; a sense strand which is complementary to said antisense strand; and one or more lipophilic monomers, containing one or more lipophilic moieties, conjugated to one or more positions on at least one strand, optionally via a linker or carrier. In some embodiments, the lipophilicity of the lipophilic moiety, measured by octanol-water partition coefficient, logP, exceeds 0.

[0135] In some embodiments, the lipophilic moiety is an aliphatic, cyclic such as alicyclic, or polycyclic such as polyalicyclic compound, such as a steroid (e.g., sterol), a linear or branched aliphatic hydrocarbon, or an aromatic. Exemplary lipophilic moieties may include lipid, cholesterol, retinoic acid, cholic acid, adamantane acetic acid, 1-pyrene butyric acid, dihydrotestosterone, 1,3-bis-O(hexadecyl)glycerol, geranyloxyhexyanol, hexadecylglycerol, borneol, menthol, 1,3-propanediol, heptadecyl group, palmitic acid, myristic acid, O3-(oleoyl) lithocholic acid, O3-(oleoyl) cholenic acid, ibuprofen, naproxen, dimethoxytrityl, or phenoxazine. Suitable lipophilic moieties may also include those containing a saturated or unsaturated C4-C30 hydrocarbon chain (e.g., C4-C30 alkyl or alkenyl), and an optional functional group selected from the group consisting of hydroxyl, amine, carboxylic acid, sulfonate, phosphate, thiol, azide, and alkyne. The functional group may be useful to attach the lipophilic moiety to the oligonucleotide. In some embodiments, the lipophilic moiety contains a saturated or unsaturated C6-C18 hydrocarbon chain (e.g., a linear C6-C18 alkyl or alkenyl). In some embodiments, the lipophilic moiety contains a saturated or unsaturated C16 hydrocarbon chain (e.g., a linear C16 alkyl or alkenyl). In some embodiments, the lipophilic moiety contains two or more carbon-carbon double bonds.

[0136] In some embodiments, the composition comprises an oligonucleotide that inhibits the expression of MTRES1, wherein the oligonucleotide comprises a hydrophobic moiety. The hydrophobic moiety may be attached at a 3′ or 5′ terminus of the oligonucleotide. The hydrophobic moiety may include a lipid such as a fatty acid. The hydrophobic moiety may include a hydrocarbon. The hydrocarbon may be linear. The hydrocarbon may be non-linear. The hydrophobic moiety may include a lipid moiety or a cholesterol moiety, or a combination thereof.

[0137] In some embodiments, the composition comprises an oligonucleotide that inhibits the expression of MTRES1, wherein the oligonucleotide comprises a lipid attached at a 3′ or 5′ terminus of the oligonucleotide. In some embodiments, the lipid comprises cholesterol, myristoyl, palmitoyl, stearoyl, lithocholoyl, docosanoyl, docosahexaenoyl, myristyl, palmityl, stearyl, or α-tocopherol, or a combination thereof.

[0138] In some embodiments, the composition comprises an oligonucleotide that inhibits the expression of MTRES1, wherein the oligonucleotide comprises a hydrophobic ligand or moiety. In some embodiments, the hydrophobic ligand or moiety comprises cholesterol. In some embodiments, the hydrophobic ligand or moiety comprises a cholesterol derivative. In some embodiments, the hydrophobic ligand or moiety is attached at a 3′ terminus of the oligonucleotide. In some embodiments, the hydrophobic ligand or moiety s attached at a 5′ terminus of the oligonucleotide. In some embodiments, the composition comprises a sense strand, and the hydrophobic ligand or moiety is attached to the sense strand (e.g. attached to a 5′ end of the sense strand, or attached to a 3′ end of the sense strand). In some embodiments, the composition comprises an antisense strand, and the hydrophobic ligand or moiety is attached to the antisense strand (e.g. attached to a 5′ end of the antisense strand, or attached to a 3′ end of the antisense strand). In some embodiments, the composition comprises a hydrophobic ligand or moiety attached at a 3′ or 5′ terminus of the oligonucleotide.

[0139] In some embodiments, a hydrophobic moiety is attached to the oligonucleotide (e.g. a sense strand and/or an antisense strand of a siRNA). In some embodiments, a hydrophobic moiety is attached at a 3′ terminus of the oligonucleotide. In some embodiments, a hydrophobic moiety is attached at a 5′ terminus of the oligonucleotide. In some embodiments, the hydrophobic moiety comprises cholesterol. In some embodiments, the hydrophobic moiety includes a cyclohexanyl.

[0140] In some embodiments, the composition comprises an oligonucleotide that inhibits the expression of MTRES1, wherein the oligonucleotide comprises a lipid attached at a 3′ or 5′ terminus of the oligonucleotide. In some embodiments, a lipid is attached at a 3′ terminus of the oligonucleotide. In some embodiments, a lipid is attached at a 5′ terminus of the oligonucleotide. In some embodiments, the lipid comprises cholesterol, myristoyl, palmitoyl, stearoyl, lithocholoyl, docosanoyl, docosahexaenoyl, myristyl, palmityl, stearyl, or α-tocopherol, or a combination thereof. In some embodiments, the lipid comprises stearyl, lithocholyl, docosanyl, docosahexaenyl, or myristyl. In some embodiments, the lipid comprises cholesterol. In some embodiments, the lipid includes a sterol such as cholesterol. In some embodiments, the lipid comprises stearyl, t-butylphenol, n-butylphenol, octylphenol, dodecylphenol, phenyl n-dodecyl, octadecylbenzamide, hexadecylbenzamide, or octadecylcyclohexyl. In some embodiments, the lipid comprises phenyl para C12.

[0141] In some embodiments, the oligonucleotide comprises any aspect of the following structure:

[chemical structure]

[0142] In some embodiments, R is not octane. In some embodiments, R is not an octane. In some embodiments, R is an alkyl group containing 4-7 or 9-18 carbons. In some embodiments, the oligonucleotide comprises any aspect of the following structure:

[chemical structure]

In some embodiments, the oligonucleotide comprises any aspect of the following structure:

[chemical structure]

In some embodiments, the oligonucleotide comprises any aspect of the following structure: The aspect included in the oligonucleotide may include the entire structure, or may include the lipid moiety, of any of the structures shown. In some embodiments, n is 1-3. In some embodiments, n is 1, 2, 3, 4, 5, 6, 7, 8, 9, 10, 11, 12, 13, 14, 15, or 16 carbons. In some embodiments, n is 1. In some embodiments, n is 2. In some embodiments, n is 3. In some embodiments, R is an alkyl group. In some embodiments, the alkyl group contains 1, 2, 3, 4, 5, 6, 7, 8, 9, 10, 11, 12, 13, 14, 15, 16, 17, 18, 19, or 20 carbons. In some embodiments, the alkyl group contains 4, 5, 6, 7, 8, 9, 10, 11, 12, 13, 14, 15, 16, 17, or 18 carbons, or a range defined by any two of the aforementioned numbers of carbons. In some embodiments, the alkyl group contains 12 carbons. In some embodiments, the alkyl group contains 14 carbons. In some embodiments, the alkyl group contains 15 carbons. In some embodiments, the alkyl group contains 16 carbons. In some embodiments, the alkyl group contains 18 carbons. In some embodiments, the alkyl group contains 4-18 carbons. In some embodiments, the oligonucleotide does not comprise a phenyloctyl group. In some embodiments, the alkyl group contains 11 carbons. In some embodiments, the alkyl group contains 12 carbons. In some embodiments, the alkyl group contains 13 carbons. In some embodiments, the alkyl group contains 14 carbons. In some embodiments, the alkyl group contains 15 carbons. In some embodiments, the alkyl group contains 16 carbons. In some embodiments, the alkyl group contains 17 carbons. In some embodiments, the alkyl group contains 18 carbons. In some embodiments, R is not an octane (C₈). In some embodiments, R includes a branched carbon chain. In some embodiments, R includes an unbranched carbon chain. In some embodiments, the lipid moiety comprises an alcohol or ether. In some embodiments, the lipid moiety has at least one degree of unsaturation. In some embodiments, the lipid moiety is an omega fatty acid, such as an omega-3, omega-5, omega-6, omega-7, or omega-9 fatty acid.

[0143] In some embodiments, the lipid includes a fatty acid. In some embodiments, the lipid comprises a lipid depicted in Table 1. The example lipid moieties in Table 1 are shown attached at a 5′ end of an oligonucleotide, in which the 5′ terminal phosphate of the oligonucleotide is shown with the lipid moiety. In some embodiments, a lipid moiety in Table 1 may be attached at a different point of attachment than shown. For example, the point of attachment of any of the lipid moieties in the table may be at a 3′ oligonucleotide end. In some embodiments, the lipid is used for targeting the oligonucleotide to a non-hepatic cell or tissue.

TABLE 1
Hydrophobic moiety examples

| Hydrophobic | Hydrophobic | |
|---|---|---|
| Moiety Description | Moiety Name | Example Conjugation |
| stearly | ETL3 | [chemical structure] |
| t-butylphenyl | ETL7 | [chemical structure] |
| n-butylphenyl | ETL8 | [chemical structure] |
| octylphenyl | ETL9 | [chemical structure] |
| dodecylphenyl (mixture of ortho and para) | ETL10 | [chemical structure] |
| | | [chemical structure] |
| phenyl n-dodecyl | ETL12 | [chemical structure] |
| octadecylbenzamide | ETL13 | [chemical structure] |
| hexadecylbenzamide | ETL15 | [chemical structure] |
| octadecylcyclohexyl | ETL16 | [chemical structure] |
| Myristamido methylphenyl | ETL18 | [chemical structure] |
| Lauramido methylphenyl | ETL19 | [chemical structure] |
| Palmitoamidoethyl- phenyl | ETL20 | [chemical structure] |

[0144] In some embodiments, the lipid or lipid moiety includes 16 to 18 carbons. In some embodiments, the lipid includes 16 carbons. In some embodiments, the lipid includes 17 carbons. In some embodiments, the lipid includes 18 carbons. In some embodiments, the lipid moiety includes 16 carbons. In some embodiments, the lipid moiety includes 17 carbons. In some embodiments, the lipid moiety includes 18 carbons. In some embodiments, the lipid moiety includes 19 carbons. In some embodiments, the lipid moiety includes 20 carbons.

[0145] The hydrophobic moiety may include a linker that comprises a carbocycle. The carbocycle may be six-membered. Some examples of a carbocycle include phenyl or cyclohexyl. The linker may include a phenyl. The linker may include a cyclohexyl. The lipid may be attached to the carbocycle, which may in turn be attached at a phosphate (e.g. 5′ or 3′ phosphate) of the oligonucleotide. In some embodiments, the lipid or hydrocarbon, and the end of the sense are connected to the phenyl or cyclohexyl linker in the 1,4; 1,3; or 1,2 substitution pattern (e.g. the para, meta, or ortho phenyl configuration). In some embodiments, the lipid or hydrocarbon, and the end of the sense are connected to the phenyl or cyclohexyl linker in the 1,4-substitution pattern (e.g. the para phenyl configuration). The lipid may be attached to the carbocycle in the 1,4-substitution pattern relative to the oligonucleotide. The lipid may be attached to the carbocycle in the 1,3-substitution pattern relative to the oligonucleotide. The lipid may be attached to the carbocycle in the 1,2-substitution pattern relative to the oligonucleotide. The lipid may be attached to the carbocycle in the ortho orientation relative to the oligonucleotide. The lipid may be attached to the carbocycle in the para orientation relative to the oligonucleotide. The lipid may be attached to the carbocycle in the meta orientation relative to the oligonucleotide.

[0146] The lipid moiety may comprise or consist of the following structure:

[chemical structure]

In some embodiments, the lipid moiety comprises or consists of the following structure:

[chemical structure]

In some embodiments, the lipid moiety comprises the following structure:

[chemical structure]

In some embodiments, the lipid moiety comprises or consist of the following structure:

[chemical structure]

In some embodiments, the dotted line indicates a covalent connection. The covalent connection may between an end of the sense or antisense strand. For example, the connection may be to the 5′ end of the sense strand. In some embodiments, n is 0-3. In some embodiments, n is 1-3. In some embodiments, n is 0. In some embodiments, n is 1. In some embodiments, n is 2. In some embodiments, n is 3. In some embodiments, n is 4. In some embodiments, n is 5. In some embodiments, n is 1, 2, 3, 4, 5, 6, 7, 8, 9, or 10. In some embodiments, R includes a branched carbon chain. In some embodiments, R includes an unbranched carbon chain. In some embodiments, R is an alkyl group. In some embodiments, the alkyl group contains 1, 2, 3, 4, 5, 6, 7, 8, 9, 10, 11, 12, 13, 14, 15, 16, 17, 18, 19, or 20 carbons. In some embodiments, the alkyl group contains 4, 5, 6, 7, 8, 9, 10, 11, 12, 13, 14, 15, 16, 17, or 18 carbons, or a range defined by any two of the aforementioned numbers of carbons. In some embodiments, the alkyl group contains 11 carbons. In some embodiments, the alkyl group contains 12 carbons. In some embodiments, the alkyl group contains 13 carbons. In some embodiments, the alkyl group contains 14 carbons. In some embodiments, the alkyl group contains 15 carbons. In some embodiments, the alkyl group contains 16 carbons. In some embodiments, the alkyl group contains 17 carbons. In some embodiments, the alkyl group contains 18 carbons. In some embodiments, R comprises or consists of an alkyl group containing 4-18 carbons. In some embodiments, the lipid moiety is not a phenyloctyl group. In some embodiments, R is not octane. In some embodiments, R is a carbon chain containing 4-7 or 9-18 carbons. In some embodiments, the lipid moiety is not a phenyloctyl group.

[0147] In some embodiments, the 5′ hydrophobic moiety comprises any one of the following structures:

[chemical structure]

wherein the dotted line indicates a covalent connection to the end of the 5′ end of the sense strand, n is 1-3, and R is an alkyl group containing 4-18 carbons. In some embodiments, R is not an octane. In some embodiments, the alkyl group contains 4-7 or 9-18 carbons. In some embodiments, the alkyl group contains 14 carbons. In some embodiments, the alkyl group contains 15 carbons. In some embodiments, the alkyl group contains 16 carbons. In some embodiments, the alkyl group contains 17 carbons. In some embodiments, the alkyl group contains 18 carbons. In some embodiments, the 5′ hydrophobic moiety comprises a hydrophobic moiety in Table 1. In some embodiments, the 5′ hydrophobic moiety comprises phenyl para C12. In some embodiments, n is 1, 2, 3, 4, 5, 6, 7, 8, 9, 10, 11, 12, 13, or 14. In some embodiments, n is 0-3. In some embodiments, n is 1-3. In some embodiments, n is 1. In some embodiments n is 2. In some embodiments, the hydrophobic moiety comprises an alcohol or an ether. In some embodiments, R is an unsaturated alkyl group. In some embodiments, the unsaturated alkyl group may be monounsaturated. In some embodiments, the unsaturated alkyl group may be unsaturated at the omega-3, position, omega-4 position, omega-5 position, omega-6 position, omega-7 position, omega-8 position, omega-9 position, or a combination thereof. In some embodiments, the 5′ hydrophobic moiety is not a phenyloctyl group.

[0148] The hydrophobic moiety may include a linker that comprises a carbocycle. The carbocycle may be six-membered. Some examples of a carbocycle include phenyl or cyclohexyl. The linker may include a phenyl. The linker may include a cyclohexyl. The lipid may be attached to the carbocycle, which may in turn be attached at a phosphate (e.g. 5′ or 3′ phosphate) of the oligonucleotide. In some embodiments, the lipid or hydrocarbon, and the end of the sense are connected to the phenyl or cyclohexyl linker in the 1,4; 1,3; or 1,2 substitution pattern (e.g. the para, meta, or ortho phenyl configuration). In some embodiments, the lipid or hydrocarbon, and the end of the sense are connected to the phenyl or cyclohexyl linker in the 1,4-substitution pattern (e.g. the para phenyl configuration). The lipid may be attached to the carbocycle in the ortho orientation relative to the oligonucleotide. The lipid may be attached to the carbocycle in the para orientation relative to the oligonucleotide. The lipid may be attached to the carbocycle in the meta orientation relative to the oligonucleotide. The lipid may be attached to the carbocycle in the in the 1,4 orientation relative to the oligonucleotide. The lipid may be attached to the carbocycle in the in the 1,3 orientation relative to the oligonucleotide. The lipid may be attached to the carbocycle in the in the 1,2 orientation relative to the oligonucleotide.

[0149] In some embodiments, when the lipid moiety comprises the structure:

[chemical structure]

R is not an octyl group. In some embodiments, R is an unsaturated hydrocarbon. In some embodiments, R is a monounsaturated acyl group. In some embodiments, the monounsaturated acyl group is unsaturated at the omega-3, omega-5, omega-6, omega-7, omega-8, or omega-9 position. In some embodiments, the unsaturated hydrocarbon is a polyunsaturated fatty acyl group. In some embodiments, the polyunsaturated fatty acyl group is unsaturated at least at the omega-3, omega-5, omega-6, omega-7, omega-, omega-9 position, or a combination thereof.

[0150] The lipid moiety may be attached at a 5′ end of the oligonucleotide. The 5′ end may have one phosphate linking the lipid moiety to a 5′ carbon of a sugar of the oligonucleotide. The 5′ end may have two phosphates linking the lipid moiety to a 5′ carbon of a sugar of the oligonucleotide. The 5′ end may have three phosphates linking the lipid moiety to a 5′ carbon of a sugar of the oligonucleotide. The 5′ end may have one phosphate connected to the 5′ carbon of a sugar of the oligonucleotide, where the one phosphate is connected to the lipid moiety. The 5′ end may have two phosphates connected to the 5′ carbon of a sugar of the oligonucleotide, where the one of the two phosphates is connected to the lipid moiety. The 5′ end may have three phosphates connected to the 5′ carbon of a sugar of the oligonucleotide, where the one of the three phosphates is connected to the lipid moiety. The sugar may include a ribose. The sugar may include a deoxyribose. The sugar may be modified a such as a 2′-modified sugar (e.g. a 2′-O-methyl or 2′-fluoro ribose). A phosphate of the 5′ end may include a modification such as a sulfur in place of an oxygen. Two phosphates of the 5′ end may include a modification such as a sulfur in place of an oxygen. Three phosphates of the 5′ end may include a modification such as a sulfur in place of an oxygen.

[0151] In some embodiments, the oligonucleotide includes 1 lipid moiety. In some embodiments, the oligonucleotide includes 2 lipid moieties. In some embodiments, the oligonucleotide includes 3 lipid moieties. In some embodiments, the oligonucleotide includes 4 lipid moieties.

[0152] Some embodiments relate to a method of making an oligonucleotide comprising a hydrophobic conjugate. A strategy for making hydrophobic conjugates may include use of a phosphoramidite reagent based upon a 6-membered ring alcohol such as a phenol or cyclohexanol. The phosphoramidite may be reacted to a nucleotide to connect the nucleotide to the hydrophobic moiety, and thereby produce the hydrophobic conjugate. Some examples of phosphoramidite reagents that may be used to produce a hydrophobic conjugate are provided as follows:

[chemical structure]

In some embodiments, n is 1-3. In some embodiments, n is 1. In some embodiments, n is 2. In some embodiments, n is 3. In some embodiments, R is an alkyl group. In some embodiments, the alkyl group contains 1, 2, 3, 4, 5, 6, 7, 8, 9, 10, 11, 12, 13, 14, 15, 16, 17, 18, 19, or 20 carbons. In some embodiments, the alkyl group contains 4, 5, 6, 7, 8, 9, 10, 11, 12, 13, 14, 15, 16, 17, or 18 carbons, or a range defined by any two of the aforementioned numbers of carbons. In some embodiments, R comprises or consists of an alkyl group containing 4-18 carbons. Any one of the phosphoramidite reagents may be reacted to a 5′ end of an oligonucleotide to produce an oligonucleotide comprising a hydrophobic moiety. In some embodiments, the phosphoramidite reagents is reacted to a 5′ end of a sense strand of an siRNA. The sense strand may then be hybridized to an antisense strand to form a duplex. The hybridization may be performed by incubating the sense and antisense strands in solution at a given temperature. The temperature may be gradually reduced. The temperature may comprise or include a temperature comprising an annealing temperature for the sense and antisense strands. The temperature may be below or include a temperature below the annealing temperature for the sense and antisense strands. The temperature may be below a melting temperature of the sense and antisense strands.

[0153] The lipid may be attached to the oligonucleotide by a linker. The linker may include a polyethyleneglycol (e.g. tetraethyleneglycol).

[0154] The modifications described herein may be useful for delivery to a cell or tissue, for example, extrahepatic delivery or targeting of an oligonucleotide composition. The modifications described herein may be useful for targeting an oligonucleotide composition to a cell or tissue.

### 2. Sugar Moieties

[0155] In some embodiments, the composition comprises an oligonucleotide that inhibits the expression of MTRES1, wherein the oligonucleotide comprises a sugar moiety. The sugar moiety may include an N-acetyl galactose moiety (e.g. an N-acetylgalactosamine (GalNAc) moiety), an N-acetyl glucose moiety (e.g. an N-acetylglucosamine (GlcNAc) moiety), a fucose moiety, or a mannose moiety. The sugar moiety may include 1, 2, 3, or more sugar molecules. The sugar moiety may be attached at a 3′ or 5′ terminus of the oligonucleotide. The sugar moiety may include an N-acetyl galactose moiety. The sugar moiety may include an N-acetylgalactosamine (GalNAc) moiety. The sugar moiety may include an N-acetyl glucose moiety. The sugar moiety may include N-acetylglucosamine (GlcNAc) moiety. The sugar moiety may include a fucose moiety. The sugar moiety may include a mannose moiety. N-acetyl glucose, GlcNAc, fucose, or mannose may be useful for targeting macrophages when they target or bind a mannose receptor such as CD206. The sugar moiety may be useful for binding or targeting an asialoglycoprotein receptor such as an asialoglycoprotein receptor of a hepatocyte. The GalNAc moiety may bind to an asialoglycoprotein receptor. The GalNAc moiety may target a hepatocyte.

[0156] In some embodiments, the composition comprises an oligonucleotide that inhibits the expression of MTRES1, wherein the oligonucleotide comprises an N-acetylgalactosamine (GalNAc) moiety. GalNAc may be useful for hepatocyte targeting. The GalNAc moiety may include a bivalent or trivalent branched linker. The oligo may be attached to 1, 2 or 3 GalNAcs through a bivalent or trivalent branched linker. The GalNAc moiety may include 1, 2, 3, or more GalNAc molecules. The GalNAc moiety may be attached at a 3′ or 5′ terminus of the oligonucleotide.

[0157] In some embodiments, the composition comprises an oligonucleotide that inhibits the expression of MTRES1, wherein the oligonucleotide comprises an N-acetylgalactosamine (GalNAc) ligand for hepatocyte targeting. In some embodiments, the composition comprises GalNAc. In some embodiments, the composition comprises a GalNAc derivative. In some embodiments, the GalNAc ligand is attached at a 3′ terminus of the oligonucleotide. In some embodiments, the GalNAc ligand is attached at a 5′ terminus of the oligonucleotide. In some embodiments, the composition comprises a sense strand, and the GalNAc ligand is attached to the sense strand (e.g. attached to a 5′ end of the sense strand, or attached to a 3′ end of the sense strand). In some embodiments, the composition comprises an antisense strand, and the GalNAc ligand is attached to the antisense strand (e.g. attached to a 5′ end of the antisense strand, or attached to a 3′ end of the antisense strand). In some embodiments, the composition comprises a GalNAc ligand attached at a 3′ or 5′ terminus of the oligonucleotide.

[0158] Disclosed herein, in some embodiments, are compositions comprising an oligonucleotide that inhibits the expression of MTRES1, wherein the oligonucleotide comprises a GalNAc moiety. The GalNAc moiety may be included in any formula, structure, or GalNAc moiety shown below. In some embodiments, described herein is a compound (e.g. oligonucleotide) represented by Formula (I) or (II):

[chemical structure]

[0159] or a salt thereof, wherein
[0160] J is an oligonucleotide;
[0161] each w is independently selected from any value from 1 to 20;
[0162] each v is independently selected from any value from 1 to 20;
[0163] n is selected from any value from 1 to 20;
[0164] m is selected from any value from 1 to 20;
[0165] z is selected from any value from 1 to 3, wherein
[0166] if z is 3, Y is C
[0167] if z is 2, Y is CR6, or
[0168] if z is 1, Y is C(R⁶)₂;
[0169] Q is selected from:
[0170] C₃₋₁₀ carbocycle optionally substituted with one or more substituents independently selected from halogen, —CN, —NO₂, —OR⁷, —SR⁷, —N(R⁷)₂, —C(O)R⁷, —C(O)N(R⁷)₂, —N(R⁷)C(O)R⁷, —N(R⁷)C(O)N(R⁷)₂, —OC(O)N(R⁷)₂, —N(R⁷)C(O)OR⁷, —C(O)OR⁷, —OC(O)R⁷, —S(O)R⁷, and C₁₋₆ alkyl, wherein the C₁₋₆ alkyl, is optionally substituted with one or more substituents independently selected from halogen, —CN, —OH, —SH, —NO₂, and —NH₂;
[0171] R¹ is a linker selected from:
[0172] —O—, —S—, —N(R⁷)—, —C(O)—, —C(O)N(R⁷)—, —N(R⁷)C(O)—, —N(R⁷)C(O)N(R⁷)—, —OC(O)N(R⁷)—, —N(R⁷)C(O)O—, —C(O)O—, —OC(O)—, —S(O)—, —S(O)₂—, —OS(O)₂—, —OP(O)(OR⁷)O—, —SP(O)(OR⁷)O—, —OP(S)(OR⁷)O—, —OP(O)(SR⁷)O—, —OP(O)(OR⁷)S—, —OP(O)(O⁻)O—, —SP(O)(O⁻)O—, —OP(S)(O⁻)O—, —OP(O)(S⁻)O—, —OP(O)(O⁻) S—, —OP(O)(OR⁷)NR⁷—, —OP(O)(N(R⁷)₂)NR⁷—, —OP(OR⁷)O—, —OP(N(R⁷)₂)O—, —OP(OR⁷)N(R⁷)—, and —OPN(R⁷)₂NR⁷—;
[0173] each R² is independently selected from:
[0174] C₁₋₆ alkyl optionally substituted with one or more substituents independently selected from halogen, —OR⁷, —SR⁷, —N(R⁷)₂, —C(O)R⁷, —C(O)N(R⁷)₂, —N(R⁷)C(O)R⁷, —N(R⁷)C(O)N(R⁷)₂, —OC(O)N(R⁷)₂, —N(R⁷)C(O)OR⁷, —C(O)OR⁷, —OC(O)R⁷, and —S(O)R⁷;
[0175] R³ and R⁴ are each independently selected from:
[0176] —OR⁷, —SR⁷, —N(R⁷)₂, —C(O)R⁷, —C(O)N(R⁷)₂, —N(R⁷)C(O)R⁷, —N(R⁷)C(O)N(R⁷)₂, —OC(O)N(R⁷)₂, —N(R⁷)C(O)OR⁷, —C(O)OR⁷, —OC(O)R⁷, and —S(O)R⁷;
[0177] each R⁵ is independently selected from:
[0178] —OC(O)R⁷, —OC(O)N(R⁷)₂, —N(R⁷)C(O)R⁷, —N(R¹)C(O)N(R⁷)₂, —N(R¹)C(O)OR⁷, —C(O)R⁷, —C(O)OR⁷, and —C(O)N(R⁷)₂;
[0179] each R⁶ is independently selected from:
[0180] hydrogen;
[0181] halogen, —CN, —NO₂, —OR⁷, —SR⁷, —N(R⁷)₂, —C(O)R⁷, —C(O)N(R⁷)₂, —N(R⁷)C(O)R⁷, —N(R⁷)C(O)N(R⁷)₂, —OC(O)N(R⁷)₂, —N(R⁷)C(O)OR⁷, —C(O)OR⁷, —OC(O)R⁷, and —S(O)R⁷; and
[0182] C₁₋₆ alkyl optionally substituted with one or more substituents independently selected from halogen, —CN, —NO₂, —OR⁷, —SR⁷, —N(R⁷)₂, —C(O)R⁷, —C(O)N(R⁷)₂, —N(R⁷)C(O)R⁷, —N(R⁷)C(O)N(R⁷)₂, —OC(O)N(R⁷)₂, —N(R⁷)C(O)OR⁷, —C(O)OR⁷, —OC(O)R⁷, and —S(O)R⁷;
[0183] each R⁷ is independently selected from:
[0184] hydrogen;
[0185] C₁₋₆ alkyl, C₂₋₆ alkenyl, and C₂₋₆ alkynyl, each of which is optionally substituted with one or more substituents independently selected from halogen, —CN, —OH, —SH, —NO₂, —NH₂, ═O, ═S, —O—C₁₋₆ alkyl, —S—C₁₋₆ alkyl, —N(C₁₋₆ alkyl) 2, —NH(C₁₋₆ alkyl), C₃₋₁₀ carbocycle, and 3- to 10-membered heterocycle; and
[0186] C₃₋₁₀ carbocycle, and 3- to 10-membered heterocycle, each of which is optionally substituted with one or more substituents independently selected from halogen, —CN, —OH, —SH, —NO₂, —NH₂, ═O, ═S, —O—C₁₋₆ alkyl, —S—C₁₋₆ alkyl, —N(C₁₋₆ alkyl) 2, —NH(C₁₋₆ alkyl), C₁₋₆ alkyl, C₂₋₆ alkenyl, C₂₋₆ alkynyl, C₃₋₁₀ carbocycle, 3- to 10-membered heterocycle, and C₁₋₆ haloalkyl.

[0187] In some embodiments, each w is independently selected from any value from 1 to 10. In some embodiments, each w is independently selected from any value from 1 to 5. In some embodiments, each w is 1. In some embodiments, each v is independently selected from any value from 1 to 10. In some embodiments, each v is independently selected from any value from 1 to 5. In some embodiments, each v is 1. In some embodiments, n is selected from any value from 1 to 10. In some embodiments, n is selected from any value from 1 to 5. In some embodiments, n is 2. In some embodiments, m is selected from any value from 1 to 10. In some embodiments, m is selected from any value from 1 to 5. In some embodiments, m is selected from 1 and 2. In some embodiments, z is 3 and Y is C. In some embodiments, Q is selected from C₅₋₆ carbocycle optionally substituted with one or more substituents independently selected from halogen, —CN, —NO₂, —OR⁷, —SR⁷, —N(R⁷)₂, —C(O)R⁷, —C(O)N(R⁷)₂, —N(R⁷)C(O)R⁷, —N(R¹)C(O)N(R⁷)₂, —OC(O)N(R⁷)₂, —N(R⁷)C(O)OR⁷, —C(O)OR⁷, —OC(O)R⁷, and —S(O)R⁷. In some embodiments, Q is selected from C₅₋₆ carbocycle optionally substituted with one or more substituents independently selected from halogen, —CN, —OH, —SH, —NO₂, and —NH₂. In some embodiments, Q is selected from phenyl and cyclohexyl, each of which is optionally substituted with one or more substituents independently selected from halogen, —CN, —OH, —SH, —NO₂, and —NH₂. In some embodiments, Q is selected from phenyl. In some embodiments, Q is selected from cyclohexyl. In some embodiments, R¹ is selected from —OP(O)(OR⁷)O—, —SP(O)(OR⁷)O—, —OP(S)(OR⁷)O—, —OP(O)(SR⁷)O—, —OP(O)(OR¹)S—, —OP(O)(O—)O—, —SP(O)(O—)O—, —OP(S)(O)O—, —OP(O)(S—)O—, —OP(O)(O—)S—, —OP(O)(OR⁷)NR⁷—, —OP(O)(N(R⁷)₂)NR⁷—, —OP(OR⁷)O—, —OP(N(R⁷)₂)O—, —OP(OR⁷)N(R⁷)—, and —OPN(R⁷)₂. NR⁷. In some embodiments, R¹ is selected from —OP(O)(OR⁷)O—, —SP(O)(OR⁷)O—, —OP(S)(OR⁷)O—, —OP(O)(SR⁷)O—, —OP(O)(OR⁷)S—, —OP(O)(O⁻)O—, —SP(O)(O⁻)O—, —OP(S)(O)O—, —OP(O)(S⁻)O—, —OP(O)(O⁻)S—, and —OP(OR⁷)O—. In some embodiments, R¹ is selected from —OP(O)(OR⁷)O—, —OP(S)(OR⁷)O—, —OP(O)(O)O—, —OP(S)(O)O—, —OP(O)(S)O—, and —OP(OR⁷)O—. In some embodiments, R¹ is selected from —OP(O)(OR⁷)O— and —OP(OR⁷)O—. In some embodiments, R² is selected from C₁₋₃ alkyl substituted with one or more substituents independently selected from halogen, —OR⁷, —OC(O)R⁷, —SR⁷, —N(R⁷)₂, —C(O)R⁷, and —S(O)R⁷. In some embodiments, R² is selected from C₁₋₃ alkyl substituted with one or more substituents independently selected from —OR⁷, —OC(O)R⁷, —SR⁷, and —N(R⁷)₂. In some embodiments, R² is selected from C₁₋₃ alkyl substituted with one or more substituents independently selected from —OR⁷ and —OC(O)R⁷. In some embodiments, R³ is selected from halogen, —OR⁷, —SR⁷, —N(R⁷)₂, —C(O)R⁷, —OC(O)R⁷, and —S(O)R⁷. In some embodiments, R³ is selected from —OR⁷—SR⁷, —OC(O)R⁷, and —N(R⁷)₂. In some embodiments, R³ is selected from —OR⁷— and —OC(O)R⁷. In some embodiments, R⁴ is selected from halogen, —OR⁷, —SR⁷, —N(R⁷)₂, —C(O)R⁷, —OC(O)R⁷, and —S(O)R⁷. In some embodiments, R⁴ is selected from —OR⁷—SR⁷, —OC(O)R⁷, and —N(R⁷)₂. In some embodiments, R⁴ is selected from —OR⁷— and —OC(O)R⁷. In some embodiments, R⁵ is selected from —OC(O)R⁷, —OC(O)N(R⁷)₂, —N(R⁷)C(O)R⁷, —N(R⁷)C(O)N(R⁷)₂, and —N(R⁷)C(O)OR⁷. In some embodiments, R⁵ is selected from —OC(O)R⁷ and —N(R⁷)C(O)R⁷. In some embodiments, each R′ is independently selected from: hydrogen; and C₁₋₆ alkyl optionally substituted with one or more substituents independently selected from halogen, —CN, —OH, —SH, —NO₂, —NH₂, ═O, ═S, —O—C₁₋₆ alkyl, —S—C₁₋₆ alkyl, —N(C₁₋₆ alkyl) 2, —NH(C₁₋₆ alkyl), C₃₋₁₀ carbocycle, or 3- to 10-membered heterocycle. In some embodiments, each R⁷ is independently selected from C₁₋₆ alkyl optionally substituted with one or more substituents independently selected from halogen, —CN, —OH, —SH, —NO₂, —NH₂, —O, ═S, —O—C₁₋₆ alkyl, —S—C₁₋₆ alkyl, —N(C₁₋₆ alkyl) 2, and —NH(C₁₋₆ alkyl). In some embodiments, each R⁷ is independently selected from C₁₋₆ alkyl optionally substituted with one or more substituents independently selected from halogen, —CN, —OH, and —SH. In some embodiments, w is 1; v is 1; n is 2; m is 1 or 2; z is 3 and Y is C; Q is phenyl or cyclohexyl, each of which is optionally substituted with one or more substituents independently selected from halogen, —CN, —OH, —SH, —NO₂, —NH₂, and C₁₋₃ alkyl; R¹ is selected from —OP(O)(OR⁷)O—, —OP(S)(OR⁷)O—, —OP(O)(O—)O—, —OP(S)(O)O—, —OP(O)(S—)O—, and —OP(OR⁷)O—; R² is C₁ alkyl substituted with —OH or —OC(O)CH₃; R³ is —OH or —OC(O)CH₃; R⁴ is —OH or —OC(O)CH₃; and R⁵ is —NH(O)CH₃. In some embodiments, the compound comprises:

[chemical structure]

[chemical structure]

[chemical structure]

[chemical structure]

[chemical structure]

[chemical structure]

[chemical structure]

[chemical structure]

[chemical structure]

[chemical structure]

[chemical structure]

[chemical structure]

[chemical structure]

[chemical structure]

In some embodiments, the oligonucleotide (J) is attached at a 5′ end or a 3′ end of the oligonucleotide. In some embodiments, the oligonucleotide comprises DNA. In some embodiments, the oligonucleotide comprises RNA. In some embodiments, the oligonucleotide comprises one or more modified internucleoside linkages. In some embodiments, the one or more modified internucleoside linkages comprise alkylphosphonate, phosphorothioate, methylphosphonate, phosphorodithioate, alkylphosphonothioate, phosphoramidate, carbamate, carbonate, phosphate triester, acetamidate, or carboxymethyl ester, or a combination thereof. In some embodiments, the oligonucleotide comprises 1, 2, 3, 4, 5, 6, 7, 8, 9, 10, 11, 12, 13, 14, 15, 16, 17, 18, 19, or 20 modified internucleoside linkages. In some embodiments, the compound binds to an asialoglycoprotein receptor. In some embodiments, the compound targets a hepatocyte.

[0188] Some embodiments include the following, where J is the oligonucleotide:

[chemical structure]

one or more additional phosphates, or one or more phosphorothioates linking to the oligonucleotide. J may include one or more additional phosphates linking to the oligonucleotide. J may include one or more phosphorothioates linking to the oligonucleotide.

[0189] Some embodiments include the following, where J is the oligonucleotide:

[chemical structure]

J may include one or more additional phosphates, or one or more phosphorothioates linking to the oligonucleotide. J may include one or more additional phosphates linking to the oligonucleotide. J may include one or more phosphorothioates linking to the oligonucleotide.

[0190] Some embodiments include the following, where J is the oligonucleotide:

[chemical structure]

J may include one or more phosphates or phosphorothioates linking to the oligonucleotide. J may include one or more phosphates linking to the oligonucleotide. J may include a phosphate linking to the oligonucleotide. J may include one or more phosphorothioates linking to the oligonucleotide. J may include a phosphorothioate linking to the oligonucleotide.

[0191] Some embodiments include the following, where J is the oligonucleotide:

[chemical structure]

The structure in this compound attached to the oligonucleotide (J) may be referred to as “ETL17,” and is an example of a GalNAc moiety. J may include one or more phosphates or phosphorothioates linking to the oligonucleotide. J may include one or more phosphates linking to the oligonucleotide. J may include a phosphate linking to the oligonucleotide. J may include one or more phosphorothioates linking to the oligonucleotide. J may include a phosphorothioate linking to the oligonucleotide.

[0192] Some embodiments include the following, where the phosphate or “5″” indicates a connection to the oligonucleotide:

[chemical structure]

[0193] Some embodiments include the following, where the phosphate or “5” indicates a connection to the oligonucleotide:

[chemical structure]

[0194] Some embodiments include the following, where J is the oligonucleotide:

[chemical structure]

include one or more phosphates or phosphorothioates linking to the oligonucleotide. J may include one or more phosphates linking to the oligonucleotide. J may include a phosphate linking to the oligonucleotide. J may include one or more phosphorothioates linking to the oligonucleotide. J may include a phosphorothioate linking to the oligonucleotide.

[0195] Some embodiments include the following, where J is the oligonucleotide:

[chemical structure]

The structure in this compound attached to the oligonucleotide (J) may be referred to as “ETL1,” and is an example of a GalNAc moiety. J may include one or more phosphates or phosphorothioates linking to the oligonucleotide. J may include one or more phosphates linking to the oligonucleotide. J may include a phosphate linking to the oligonucleotide. J may include one or more phosphorothioates linking to the oligonucleotide. J may include a phosphorothioate linking to the oligonucleotide.
3. siRNA Modification Patterns

[0196] In some embodiments, the composition comprises an oligonucleotide that inhibits the expression of MTRES1, wherein the oligonucleotide comprises an siRNA comprising a sense strand and an antisense strand, wherein the sense strand comprises modification pattern 1S: 5′-NfsnsNfnNfnNfNfNfnNfnNfnNfnNfnNfsnsn-3′, wherein “Nf” is a 2′-fluoro-modified nucleoside, “n” is a 2′-O-methyl modified nucleoside, and “s” is a phosphorothioate or phosphate linkage. In some embodiments, the sense strand comprises modification pattern 2S: 5′-nsnsnnNfnNfNfNfnnnnnnnnnnsnsn-3′, wherein “Nf” is a 2′-fluoro-modified nucleoside, “n” is a 2′-O-methyl modified nucleoside, and “s” is a phosphorothioate or phosphate linkage. In some embodiments, the sense strand comprises modification pattern 3S: 5′-nsnsnnNfnNfnNfnnnnnnnnnnsnsn-3′, wherein “Nf” is a 2′-fluoro-modified nucleoside, “n” is a 2′-O-methyl modified nucleoside, and “s” is a phosphorothioate or phosphate linkage. In some embodiments, the sense strand comprises modification pattern 4S: 5′-NfsnsNfnNfnNfNfNfnNfnNfnNfnNfnNfsnsnN-moiety-3′, wherein “Nf” is a 2′-fluoro-modified nucleoside, “n” is a 2′-O-methyl modified nucleoside, “s” is a phosphorothioate or phosphate linkage, and N comprises one or more nucleosides. In some embodiments, the sense strand comprises modification pattern 5S: 5′-nsnsnnNfnNfNfNfnnnnnnnnnnsnsnN-moiety-3′, wherein “Nf” is a 2′-fluoro-modified nucleoside, “n” is a 2′-O-methyl modified nucleoside, “s” is a phosphorothioate or phosphate linkage, and N comprises one or more nucleosides. In some embodiments, the moiety in modification pattern 4S or 5S is a lipophilic moiety. In some embodiments, the moiety in modification pattern 4S or 5S is a lipid moiety. In some embodiments, the sense strand comprises modification pattern 6S: 5′-NfsnsNfnNfnNfnNfnNfnNfnNfnNfnNfsnsn-3′, wherein “Nf” is a 2′-fluoro-modified nucleoside, “n” is a 2′-O-methyl modified nucleoside, and “s” is a phosphorothioate or phosphate linkage. In some embodiments, the sense strand comprises modification pattern 7S: 5′-nsnsnnNfNfNfNfNfnnnnnnnnnnsnsn-3′, wherein “Nf” is a 2′-fluoro-modified nucleoside, “n” is a 2′-O-methyl modified nucleoside, and “s” is a phosphorothioate or phosphate linkage. In some embodiments, the sense strand comprises modification pattern 8S: 5′-nsnsnnnNfNfNfNfnnnnnnnnnnsnsn-3′, wherein “Nf” is a 2′-fluoro-modified nucleoside, “n” is a 2′-O-methyl modified nucleoside, and “s” is a phosphorothioate or phosphate linkage. In some embodiments, the sense strand comprises modification pattern 9S: 5′-nsnsnnnnNfNfNfNfnnnnnnnnnsnsn-3′, wherein “Nf” is a 2′-fluoro-modified nucleoside, “n” is a 2′-O-methyl modified nucleoside, and “s” is a phosphorothioate or phosphate linkage. In some embodiments, the sense strand comprises modification pattern 10S: 5′-NfsnsnnNfnNfnNfnNfnNfnNfnNfnnsnsn-3′, wherein “Nf” is a 2′-fluoro-modified nucleoside, “n” is a 2′-O-methyl modified nucleoside, and “s” is a phosphorothioate or phosphate linkage. In some embodiments, the sense strand comprises modification pattern 11S: 5′-nsnsNfnNfnNfnNfnNfnNfnnnNfnNfsnsn-3′, wherein “Nf” is a 2′-fluoro-modified nucleoside, “n” is a 2′-O-methyl modified nucleoside, and “s” is a phosphorothioate or phosphate linkage. In some embodiments, the sense strand comprises modification pattern 12S: 5′-NfsnsNfnNfnNfnNfnNfnnnNfnNfnNfsnsn-3′, wherein “Nf” is a 2′-fluoro-modified nucleoside, “n” is a 2′-O-methyl modified nucleoside, and “s” is a phosphorothioate or phosphate linkage. In some embodiments, the sense strand comprises modification pattern 13S: 5′-nsnsnnnnNfnNfnNfnNfnNfnNfnNfsnsn-3′, wherein “Nf” is a 2′-fluoro-modified nucleoside, “n” is a 2′-O-methyl modified nucleoside, and “s” is a phosphorothioate or phosphate linkage. In some embodiments, the sense strand comprises modification pattern 14S: 5′-snnnnnnNfNfNfNfnnnnnnnnnsnsn-3′, wherein “Nf” is a 2′-fluoro-modified nucleoside, “n” is a 2′-O-methyl modified nucleoside, and “s” is a phosphorothioate or phosphate linkage. In some embodiments, the sense strand comprises modification pattern 15S: 5′-snnnnNfNfNfNfNfnnnnnnnnnnsnsn-3′, wherein “Nf” is a 2′-fluoro-modified nucleoside, “n” is a 2′-O-methyl modified nucleoside, and “s” is a phosphorothioate or phosphate linkage. In some embodiments, the sense strand comprises modification pattern 16S: 5′-snnnnNfnNfNfdNnnnnnnnnnnsnsn-3′, wherein “Nf” is a 2′-fluoro-modified nucleoside, “dN” is a 2′-deoxy-modified nucleoside, “n” is a 2′-O-methyl modified nucleoside, and “s” is a phosphorothioate or phosphate linkage. In some embodiments, the sense strand comprises modification pattern 17S: 5′-snnnnnNfNfnNfnnnnnnnnnnsnsn-3′, wherein “Nf” is a 2′-fluoro-modified nucleoside, “n” is a 2′-O-methyl modified nucleoside, and “s” is a phosphorothioate or phosphate linkage. In some embodiments, the sense strand comprises modification pattern 18S: 5′-snnnnnnNfnNfNfnnnnnnnnnsnsn-3′, wherein “Nf” is a 2′-fluoro-modified nucleoside, “n” is a 2′-O-methyl modified nucleoside, and “s” is a phosphorothioate or phosphate linkage. In some embodiments, the sense strand comprises modification pattern 19S: 5′-snnnnNfnNfnNfnNfnnnnnnnnsnsn-3′, wherein “Nf” is a 2′-fluoro-modified nucleoside, “n” is a 2′-O-methyl modified nucleoside, and “s” is a phosphorothioate or phosphate linkage. In some embodiments, the sense strand comprises modification pattern 20S: 5′-snnnnNfnNfnNfnnnnnnnnnnsnsn-3′, wherein “Nf” is a 2′-fluoro-modified nucleoside, “n” is a 2′-O-methyl modified nucleoside, and “s” is a phosphorothioate or phosphate linkage. In some embodiments, the sense strand comprises modification pattern 21S: 5′-snnnnNfNfnnNfNfnnnnnnnnnsnsn-3′ (SEQ ID NO: 2536), wherein “Nf” is a 2′-fluoro-modified nucleoside, “n” is a 2′-O-methyl modified nucleoside, and “s” is a phosphorothioate or phosphate linkage. In some embodiments, the sense strand comprises modification pattern 22S: 5′-snnnnNfnnNfNfNfNfnnnnnnnnsnsn-3′, wherein “Nf” is a 2′-fluoro-modified nucleoside, “n” is a 2′-O-methyl modified nucleoside, and “s” is a phosphorothioate or phosphate linkage. In some embodiments, the sense strand comprises modification pattern 23S: 5′-snnnnnNfnNfNfnnnnnnnnnnsnsn-3′, wherein “Nf” is a 2′-fluoro-modified nucleoside, “n” is a 2′-O-methyl modified nucleoside, and “s” is a phosphorothioate or phosphate linkage. In some embodiments, the sense strand comprises modification pattern 24S: 5′-snnnnnnnNfNfNfNfnnnnnnnnsnsn-3′, wherein “Nf” is a 2′-fluoro-modified nucleoside, “n” is a 2′-O-methyl modified nucleoside, and “s” is a phosphorothioate or phosphate linkage. In some embodiments, the sense strand comprises modification pattern 25S: 5′-snnnnnNfNfNfNfNfnnnnnnnnnsnsn-3′, wherein “Nf” is a 2′-fluoro-modified nucleoside, “n” is a 2′-O-methyl modified nucleoside, and “s” is a phosphorothioate or phosphate linkage. In some embodiments, the sense strand comprises modification pattern 26S: 5′-snnnnnNfNfNfNfnnnnnnnnnnsnsn-3′, wherein “Nf” is a 2′-fluoro-modified nucleoside, “n” is a 2′-O-methyl modified nucleoside, and “s” is a phosphorothioate or phosphate linkage. In some embodiments, the sense strand comprises modification pattern 27S: 5′-snnnnnnnNfNfnNfnnnnnnnnsnsn-3′, wherein “Nf” is a 2′-fluoro-modified nucleoside, “n” is a 2′-O-methyl modified nucleoside, and “s” is a phosphorothioate or phosphate linkage. In some embodiments, the sense strand comprises modification pattern 28S: 5′-snnnnNfNfnNfNfnNfnnnnnnnnsnsn-3′, wherein “Nf” is a 2′-fluoro-modified nucleoside, “n” is a 2′-O-methyl modified nucleoside, and “s” is a phosphorothioate or phosphate linkage. In some embodiments, the sense strand comprises modification pattern 29S: 5′-snnnnnnnnNfnNfnnnnnnnnsnsn-3′, wherein “Nf” is a 2′-fluoro-modified nucleoside, “n” is a 2′-O-methyl modified nucleoside, and “s” is a phosphorothioate or phosphate linkage. In some embodiments, the sense strand comprises modification pattern 30S: 5′-snnnnNfNfnnNfnNfnnnnnnnnsnsn-3′, wherein “Nf” is a 2′-fluoro-modified nucleoside, “n” is a 2′-O-methyl modified nucleoside, and “s” is a phosphorothioate or phosphate linkage. In some embodiments, the sense strand comprises modification pattern 31S: 5′-snnnnNfNfnNfNfnnnnnnnnnnsnsn-3′, wherein “Nf” is a 2′-fluoro-modified nucleoside, “n” is a 2′-O-methyl modified nucleoside, and “s” is a phosphorothioate or phosphate linkage. In some embodiments, the sense strand comprises modification pattern 32S: 5′-snnnnnnNfNfdNNfnnnnnnnnnsnsn-3′, wherein “Nf” is a 2′-fluoro-modified nucleoside, “dN” is a 2′-deoxy-modified nucleoside, “n” is a 2′-O-methyl modified nucleoside, and “s” is a phosphorothioate or phosphate linkage. In some embodiments, the sense strand comprises modification pattern 33S: 5′-snnnnNfnNfnNfNfnnnnnnnnnsnsn-3′, wherein “Nf” is a 2′-fluoro-modified nucleoside, “dN” is a 2′-deoxy-modified nucleoside, “n” is a 2′-O-methyl modified nucleoside, and “s” is a phosphorothioate or phosphate linkage. In some embodiments, the sense strand comprises modification pattern 34S: 5′-snnnnNfnNfNfdNNfnnnnnnnnnsnsn-3′, wherein “Nf” is a 2′-fluoro-modified nucleoside, “dN” is a 2′-deoxy-modified nucleoside, “n” is a 2′-O-methyl modified nucleoside, and “s” is a phosphorothioate or phosphate linkage. In some embodiments, the sense strand comprises modification pattern 35S: 5′-snnnnnnNfNfNfNfnNfnnnnnnnsnsn-3′, wherein “Nf” is a 2′-fluoro-modified nucleoside, “dN” is a 2′-deoxy-modified nucleoside, “n” is a 2′-O-methyl modified nucleoside, and “s” is a phosphorothioate or phosphate linkage. In some embodiments, the sense strand comprises modification pattern 36S: 5′-snnnnnNfNfNfNfnNfnnnnnnnnsnsn-3′, wherein “Nf” is a 2′-fluoro-modified nucleoside, “dN” is a 2′-deoxy-modified nucleoside, “n” is a 2′-O-methyl modified nucleoside, and “s” is a phosphorothioate or phosphate linkage. In some embodiments, the sense strand comprises modification pattern 37S: 5′-snnnnNfnNfNfdTNfnnnnnnnnnsnsn-3′, wherein “Nf” is a 2′-fluoro-modified nucleoside, “dN” is a 2′-deoxy-modified nucleoside, “n” is a 2′-O-methyl modified nucleoside, and “s” is a phosphorothioate or phosphate linkage. In some embodiments, the sense strand comprises modification pattern 38S: 5′-snnnnNfnNfNfNfnnnnnnnnnnsnsn-3′, wherein “Nf” is a 2′-fluoro-modified nucleoside, “dN” is a 2′-deoxy-modified nucleoside, “n” is a 2′-O-methyl modified nucleoside, and “s” is a phosphorothioate or phosphate linkage. In some embodiments, the sense strand comprises modification pattern 39S: 5′-snnnnNfnNfNfdTnnnnnnnnnnsnsn-3′, wherein “Nf” is a 2′-fluoro-modified nucleoside, “dN” is a 2′-deoxy-modified nucleoside, “n” is a 2′-O-methyl modified nucleoside, and “s” is a phosphorothioate or phosphate linkage. In some embodiments, the sense strand comprises modification pattern 40S: 5′-snnnnNfnNfNfdNnNfnnnnnnnnsnsn-3′, wherein “Nf” is a 2′-fluoro-modified nucleoside, “dN” is a 2′-deoxy-modified nucleoside, “n” is a 2′-O-methyl modified nucleoside, and “s” is a phosphorothioate or phosphate linkage. In some embodiments, the sense strand comprises modification pattern 42S: 5′-snnnnNfnNfNfdTnNfnnnnnnnnsnsn-3′, wherein “Nf” is a 2′-fluoro-modified nucleoside, “dN” is a 2′-deoxy-modified nucleoside, “n” is a 2′-O-methyl modified nucleoside, and “s” is a phosphorothioate or phosphate linkage. In some embodiments, the sense strand comprises modification pattern 43S: 5′-snnnnnnNfnNfnNfnnnnnnnnsnsn-3′, wherein “Nf” is a 2′-fluoro-modified nucleoside, “dN” is a 2′-deoxy-modified nucleoside, “n” is a 2′-O-methyl modified nucleoside, and “s” is a phosphorothioate or phosphate linkage. In some embodiments, the sense strand comprises modification pattern 44S: 5′-snnnnNfnNfNfNfNfnnnnnnnnnsnsn-3′, wherein “Nf” is a 2′-fluoro-modified nucleoside, “dN” is a 2′-deoxy-modified nucleoside, “n” is a 2′-O-methyl modified nucleoside, and “s” is a phosphorothioate or phosphate linkage. In some embodiments, the sense strand comprises modification pattern 45S: 5′-snnnnnNfnnNfNfnnnnnnnnnsnsn-3′, wherein “Nf” is a 2′-fluoro-modified nucleoside, “dN” is a 2′-deoxy-modified nucleoside, “n” is a 2′-O-methyl modified nucleoside, and “s” is a phosphorothioate or phosphate linkage. In some embodiments, the sense strand comprises modification pattern 46S: 5′-snnnnnnNfNfNfNfNfnnnnnnnnsnsn-3′, wherein “Nf” is a 2′-fluoro-modified nucleoside, “dN” is a 2′-deoxy-modified nucleoside, “n” is a 2′-O-methyl modified nucleoside, and “s” is a phosphorothioate or phosphate linkage. In some embodiments, the sense strand comprises modification pattern 47S: 5′-snnnnnNfNfnNfnNfnnnnnnnnsnsn-3′, wherein “Nf” is a 2′-fluoro-modified nucleoside, “dN” is a 2′-deoxy-modified nucleoside, “n” is a 2′-O-methyl modified nucleoside, and “s” is a phosphorothioate or phosphate linkage. In some embodiments, the sense strand comprises modification pattern 48S: 5′-nnNfnNfnNfnNfnNfnNfnnnNfnNfsnsn-3′, wherein “Nf” is a 2′-fluoro-modified nucleoside, “dN” is a 2′-deoxy-modified nucleoside, “n” is a 2′-O-methyl modified nucleoside, and “s” is a phosphorothioate or phosphate linkage. In some embodiments, the sense strand comprises modification pattern 49S: 5′-nnNfnNfnNfnNfnNfnNfnnnNfnNfsnsn-3′, wherein “Nf” is a 2′-fluoro-modified nucleoside, “n” is a 2′-O-methyl modified nucleoside, and “s” is a phosphorothioate or phosphate linkage. In some embodiments, the sense strand comprises modification pattern 50S: 5′-nnnnnNfNfNfNfNfnnnnnnnnnsnsn-3′, wherein “Nf” is a 2′-fluoro-modified nucleoside, “n” is a 2′-O-methyl modified nucleoside, and “s” is a phosphorothioate or phosphate linkage. In some embodiments, the sense strand comprises modification pattern 51S: 5′-nnnnNfNfNfNfNfnnnnnnnnnnsnsn-3′), wherein “Nf” is a 2′-fluoro-modified nucleoside, “n” is a 2′-O-methyl modified nucleoside, and “s” is a phosphorothioate or phosphate linkage. In some embodiments, the sense strand comprises modification pattern 52S: 5′-snnnnmnNfNfNfNfnnnnnnmnnnnsnsn-3′, wherein “Nf” is a 2′-fluoro-modified nucleoside, “dN” is a 2′-deoxy-modified nucleoside, “n” is a 2′-O-methyl modified nucleoside, “nm” is a 2′-O-methoxyethyl modified nucleoside, and “s” is a phosphorothioate or phosphate linkage. In some embodiments, the sense strand comprises modification pattern 53S: 5′-snnnnmnNfNfNfNfnnnnnmnnnnnsnsn-3′, wherein “Nf” is a 2′-fluoro-modified nucleoside, “dN” is a 2′-deoxy-modified nucleoside, “n” is a 2′-O-methyl modified nucleoside, “nm” is a 2′-O-methoxyethyl modified nucleoside, and “s” is a phosphorothioate or phosphate linkage. In some embodiments, the sense strand comprises modification pattern 54S: 5′-snnnnmnNfNfNfNfnnnnmnnnnnnsnsn-3′, wherein “Nf” is a 2′-fluoro-modified nucleoside, “dN” is a 2′-deoxy-modified nucleoside, “n” is a 2′-O-methyl modified nucleoside, “nm” is a 2′-O-methoxyethyl modified nucleoside, and “s” is a phosphorothioate or phosphate linkage. In some embodiments, the sense strand comprises modification pattern 55S: 5′-snnnnmnNfNfNfNfnnnmnnnnnnnsnsn-3′, wherein “Nf” is a 2′-fluoro-modified nucleoside, “dN” is a 2′-deoxy-modified nucleoside, “n” is a 2′-O-methyl modified nucleoside, “nm” is a 2′-O-methoxyethyl modified nucleoside, and “s” is a phosphorothioate or phosphate linkage. In some embodiments, the sense strand comprises modification pattern 56S: 5′-snnnnnmNfNfNfNfnnnmnnnnnnnsnsn-3′, wherein “Nf” is a 2′-fluoro-modified nucleoside, “dN” is a 2′-deoxy-modified nucleoside, “n” is a 2′-O-methyl modified nucleoside, “nm” is a 2′-O-methoxyethyl modified nucleoside, and “s” is a phosphorothioate or phosphate linkage. In some embodiments, the sense strand comprises modification pattern 57S: 5′-snnnnnmNfNfNfNfnnnnmnnnnnnsnsn-3′, wherein “Nf” is a 2′-fluoro-modified nucleoside, “dN” is a 2′-deoxy-modified nucleoside, “n” is a 2′-O-methyl modified nucleoside, “nm” is a 2′-O-methoxyethyl modified nucleoside, and “s” is a phosphorothioate or phosphate linkage. In some embodiments, the sense strand comprises modification pattern 58S: 5′-nnnnmnNfNfNfNfnnnnmnnnnnnsnsn-3′, wherein “Nf” is a 2′-fluoro-modified nucleoside, “dN” is a 2′-deoxy-modified nucleoside, “n” is a 2′-O-methyl modified nucleoside, “nm” is a 2′-O-methoxyethyl modified nucleoside, and “s” is a phosphorothioate or phosphate linkage. In some embodiments, the sense strand comprises modification pattern 59S: 5′-snsnnnnNfNfNfNfNfnnnnnnnnnsnsn-3′, wherein “Nf” is a 2′-fluoro-modified nucleoside, “dN” is a 2′-deoxy-modified nucleoside, “n” is a 2′-O-methyl modified nucleoside, “nm” is a 2′-O-methoxyethyl modified nucleoside, and “s” is a phosphorothioate or phosphate linkage. In some embodiments, the sense strand comprises modification pattern 60S: 5′-snnnnmnnNfNfNfNfnnnmnnnnnnsnsn-3′, wherein “Nf” is a 2′-fluoro-modified nucleoside, “dN” is a 2′-deoxy-modified nucleoside, “n” is a 2′-O-methyl modified nucleoside, “nm” is a 2′-O-methoxyethyl modified nucleoside, and “s” is a phosphorothioate or phosphate linkage. In some embodiments, the sense strand comprises modification pattern 61S: 5′-snnnnmNfnNfNfNfNfnnnmnnnnnnsnsn-3′, wherein “Nf” is a 2′-fluoro-modified nucleoside, “dN” is a 2′-deoxy-modified nucleoside, “n” is a 2′-O-methyl modified nucleoside, “nm” is a 2′-O-methoxyethyl modified nucleoside, and “s” is a phosphorothioate or phosphate linkage. In some embodiments, the sense strand comprises modification pattern 62S: 5′-snnnnmnNfNfNfNfnnnnmnnnn[i]nsnsn-3′, wherein “Nf” is a 2′-fluoro-modified nucleoside, “dN” is a 2′-deoxy-modified nucleoside, “n” is a 2′-O-methyl modified nucleoside, “nm” is a 2′-O-methoxyethyl modified nucleoside, “s” is a phosphorothioate or phosphate linkage, and “[i]” is an inosine. In some embodiments, the sense strand comprises modification pattern 63S: 5′-snnnnmnNfNfNfNfnnnnmnn[i]nnnsnsn-3′, wherein “Nf” is a 2′-fluoro-modified nucleoside, “dN” is a 2′-deoxy-modified nucleoside, “n” is a 2′-O-methyl modified nucleoside, “nm” is a 2′-O-methoxyethyl modified nucleoside, “s” is a phosphorothioate or phosphate linkage, and “[i]” is an inosine. In some embodiments, the sense strand comprises modification pattern 64S: 5′-nnnnmnnNfNfNfNfnnnmnnnnnnsnsn-3′, wherein “Nf” is a 2′-fluoro-modified nucleoside, “dN” is a 2′-deoxy-modified nucleoside, “n” is a 2′-O-methyl modified nucleoside, “nm” is a 2′-O-methoxyethyl modified nucleoside, and “s” is a phosphorothioate or phosphate linkage. In some embodiments, the sense strand comprises modification pattern 65S: 5′-nsnsnnmnN(C16)NfNfNfnnnnmnnnnnnsnsn-3′, wherein “Nf” is a 2′-fluoro-modified nucleoside, “dN” is a 2′-deoxy-modified nucleoside, “n” is a 2′-O-methyl modified nucleoside, “nm” is a 2′-O-methoxyethyl modified nucleoside, “s” is a phosphorothioate or phosphate linkage, and N(C16) is 2′-O-hexadecate modification. In some embodiments, N(C16) is a 2′-O-hexadecyl adenylate.

[0197] In some embodiments, the composition comprises an oligonucleotide that inhibits the expression of MTRES1, wherein the oligonucleotide comprises an siRNA comprising a sense strand and an antisense strand, wherein the antisense strand comprises modification pattern 1AS: 5′-nsNfsnNfnNfnNfnNfnnnNfnNfnNfnsnsn-3′, wherein “Nf” is a 2′-fluoro-modified nucleoside, “n” is a 2′-O-methyl modified nucleoside, and “s” is a phosphorothioate or phosphate linkage. In some embodiments, the antisense strand comprises modification pattern 2AS: 5′-nsNfsnnnNfnNfNfnnnnNfnNfnnnsnsn-3′, wherein “Nf” is a 2′-fluoro-modified nucleoside, “n” is a 2′-O-methyl modified nucleoside, and “s” is a phosphorothioate or phosphate linkage. In some embodiments, the antisense strand comprises modification pattern 3AS: 5′-nsNfsnnnNfnnnnnnnNfnNfnnnsnsn-3′, wherein “Nf” is a 2′-fluoro-modified nucleoside, “n” is a 2′-O-methyl modified nucleoside, and “s” is a phosphorothioate or phosphate linkage. In some embodiments, the antisense strand comprises modification pattern 4AS: 5′-nsNfsnNfnNfnnnnnnnNfnNfnnnsnsn-3′, wherein “Nf” is a 2′-fluoro-modified nucleoside, “n” is a 2′-O-methyl modified nucleoside, and “s” is a phosphorothioate or phosphate linkage. In some embodiments, the antisense strand comprises modification pattern 5AS: 5′-nsNfsnnnnnnnnnnnNfnNfnnnsnsn-3′, wherein “Nf” is a 2′-fluoro-modified nucleoside, “n” is a 2′-O-methyl modified nucleoside, and “s” is a phosphorothioate or phosphate linkage. In some embodiments, the antisense strand comprises modification pattern 6AS: 5′-nsNfsnnnNfnnNfnnnnNfnNfnnnsnsn-3′, wherein “Nf” is a 2′-fluoro-modified nucleoside, “n” is a 2′-O-methyl modified nucleoside, and “s” is a phosphorothioate or phosphate linkage. In some embodiments, the antisense strand comprises modification pattern 7AS: 5′-nsNfsnNfnNfnNfnNfnNfnNfnNfnNfnsnsn-3′, wherein “Nf” is a 2′-fluoro-modified nucleoside, “n” is a 2′-O-methyl modified nucleoside, and “s” is a phosphorothioate or phosphate linkage. In some embodiments, the antisense strand comprises modification pattern 8AS: 5′-nsNfsnnnnnnnnnnnNfnnnnnsnsn-3′, wherein “Nf” is a 2′-fluoro-modified nucleoside, “n” is a 2′-O-methyl modified nucleoside, and “s” is a phosphorothioate or phosphate linkage. In some embodiments, the antisense strand comprises modification pattern 9AS: 5′-nsNfsnnnNfnNfnnnnnNfnNfnnnsnsn-3′, wherein “Nf” is a 2′-fluoro-modified nucleoside, “n” is a 2′-O-methyl modified nucleoside, and “s” is a phosphorothioate or phosphate linkage. In some embodiments, the antisense strand comprises modification pattern 10AS: 5′-nsNfsnNfsnNfnNfnNfnNfnNfnNfnNfnsnsn-3′, wherein “Nf” is a 2′-fluoro-modified nucleoside, “n” is a 2′-O-methyl modified nucleoside, and “s” is a phosphorothioate or phosphate linkage. In some embodiments, the antisense strand comprises modification pattern 11AS: 5′-nsNfsnnnNfnNfnNfnnnNfnNfnNfnsnsn-3′, wherein “Nf” is a 2′-fluoro-modified nucleoside, “dN” is a 2′-deoxy-modified nucleoside, “n” is a 2′-O-methyl modified nucleoside, and “s” is a phosphorothioate or phosphate linkage. In some embodiments, the antisense strand comprises modification pattern 12AS: 5′-nsNfsnnnNfnNfnNfnNfnNfnNfnNfnsnsn-3′, wherein “Nf” is a 2′-fluoro-modified nucleoside, “dN” is a 2′-deoxy-modified nucleoside, “n” is a 2′-O-methyl modified nucleoside, and “s” is a phosphorothioate or phosphate linkage. In some embodiments, the antisense strand comprises modification pattern 13AS: 5′-nsNfsnnNfnNfnnNfnNfnNfnNfnNfnsnsn-3′, wherein “Nf” is a 2′-fluoro-modified nucleoside, “dN” is a 2′-deoxy-modified nucleoside, “n” is a 2′-O-methyl modified nucleoside, and “s” is a phosphorothioate or phosphate linkage. In some embodiments, the antisense strand comprises modification pattern 14AS: 5′-nsNfsnnNfnNfnNfnnnnNfnNfnNfnsnsn-3′, wherein “Nf” is a 2′-fluoro-modified nucleoside, “dN” is a 2′-deoxy-modified nucleoside, “n” is a 2′-O-methyl modified nucleoside, and “s” is a phosphorothioate or phosphate linkage. In some embodiments, the antisense strand comprises modification pattern 15AS: 5′-nsNfsnNfnnNfnNfnnnnNfnNfnNfnsnsn-3′, wherein “Nf” is a 2′-fluoro-modified nucleoside, “dN” is a 2′-deoxy-modified nucleoside, “n” is a 2′-O-methyl modified nucleoside, and “s” is a phosphorothioate or phosphate linkage. In some embodiments, the antisense strand comprises modification pattern 16AS: 5′-nsNfsnnnNfnNfnnnNfnNfnNfnNfnsnsn-3′, wherein “Nf” is a 2′-fluoro-modified nucleoside, “dN” is a 2′-deoxy-modified nucleoside, “n” is a 2′-O-methyl modified nucleoside, and “s” is a phosphorothioate or phosphate linkage. In some embodiments, the antisense strand comprises modification pattern 17AS: 5′-nsNfsnNfnnNfnnNfnNfnNfnNfnNfnsnsn-3′, wherein “Nf” is a 2′-fluoro-modified nucleoside, “dN” is a 2′-deoxy-modified nucleoside, “n” is a 2′-O-methyl modified nucleoside, and “s” is a phosphorothioate or phosphate linkage. In some embodiments, the antisense strand comprises modification pattern 18AS: 5′-nsNfsnNfnnNfnnNfnnnNfnNfnNfnsnsn-3′, wherein “Nf” is a 2′-fluoro-modified nucleoside, “dN” is a 2′-deoxy-modified nucleoside, “n” is a 2′-O-methyl modified nucleoside, and “s” is a phosphorothioate or phosphate linkage. In some embodiments, the antisense strand comprises modification pattern 19AS: 5′-nsNfsnnnnNfnnNfnNfnNfnNfnNfnsnsn-3′, wherein “Nf” is a 2′-fluoro-modified nucleoside, “dN” is a 2′-deoxy-modified nucleoside, “n” is a 2′-O-methyl modified nucleoside, and “s” is a phosphorothioate or phosphate linkage. In some embodiments, the antisense strand comprises modification pattern 20AS: 5′-nsNfsnnnnNfnNfnnNfnNfnNfnNfnsnsn-3′, wherein “Nf” is a 2′-fluoro-modified nucleoside, “dN” is a 2′-deoxy-modified nucleoside, “n” is a 2′-O-methyl modified nucleoside, and “s” is a phosphorothioate or phosphate linkage. In some embodiments, the antisense strand comprises modification pattern 21AS: 5′-nsNfsnnnnNfnNfnnnnNfnNfnNfnsnsn-3′, wherein “Nf” is a 2′-fluoro-modified nucleoside, “dN” is a 2′-deoxy-modified nucleoside, “n” is a 2′-O-methyl modified nucleoside, and “s” is a phosphorothioate or phosphate linkage. In some embodiments, the antisense strand comprises modification pattern 22AS: 5′-nsNfsnNfnNfnNfnnnnnNfnNfnNfnsnsn-3′, wherein “Nf” is a 2′-fluoro-modified nucleoside, “dN” is a 2′-deoxy-modified nucleoside, “n” is a 2′-O-methyl modified nucleoside, and “s” is a phosphorothioate or phosphate linkage. In some embodiments, the antisense strand comprises modification pattern 23AS: 5′-VPnsNfsnnnNfnNfnnnnnNfnNfnnnsnsn-3′, wherein “Nf” is a 2′-fluoro-modified nucleoside, “n” is a 2′-O-methyl modified nucleoside, “s” is a phosphorothioate or phosphate linkage, and VP is a 5′-vinyl phosphonate. In some embodiments, the antisense strand comprises modification pattern 24AS: 5′-VPnsNfsnNfnNfnNfnNfnNfnNfnNfnNfnsnsn-3′, wherein “Nf” is a 2′-fluoro-modified nucleoside, “n” is a 2′-O-methyl modified nucleoside, “s” is a phosphorothioate or phosphate linkage, and VP is a 5′-vinyl phosphonate. In some embodiments, the sense strand comprises modification pattern 25AS: 5′-VPnsNfsnnnNfnNfnNfnNfnNfnNfnNfnsnsn-3′, wherein “Nf” is a 2′-fluoro-modified nucleoside, “n” is a 2′-O-methyl modified nucleoside, “s” is a phosphorothioate or phosphate linkage, and VP is a 5′-vinyl phosphonate. In some embodiments, the sense strand comprises modification pattern 26AS: 5′-VPnsNfsnnNfnNfnnNfnNfnNfnNfnNfnsnsn-3′, wherein “Nf” is a 2′-fluoro-modified nucleoside, “n” is a 2′-O-methyl modified nucleoside, “s” is a phosphorothioate or phosphate linkage, and VP is a 5′-vinyl phosphonate. In some embodiments, the sense strand comprises modification pattern 27AS: 5′-VPnsNfsnNfnnNfnNfnnnnNfnNfnNfnsnsn-3′, wherein “Nf” is a 2′-fluoro-modified nucleoside, “n” is a 2′-O-methyl modified nucleoside, “s” is a phosphorothioate or phosphate linkage, and VP is a 5′-vinyl phosphonate. In some embodiments, the sense strand comprises modification pattern 28AS: 5′-nsNfsnnNfnNfnnNfnnnNfnNfnNfnsnsn-3′, wherein “Nf” is a 2′-fluoro-modified nucleoside, “n” is a 2′-O-methyl modified nucleoside, and “s” is a phosphorothioate or phosphate linkage. In some embodiments, the sense strand comprises modification pattern 29AS: 5′-nsNfsnnNfnNfnnNfnnnNfnNfnnnsnsn-3′, wherein “Nf” is a 2′-fluoro-modified nucleoside, “n” is a 2′-O-methyl modified nucleoside, and “s” is a phosphorothioate or phosphate linkage. In some embodiments, the sense strand comprises modification pattern 30AS: 5′-nsNfsnnnNfnNfnNfnNfnNfnNfnnnsnsn-3′, wherein “Nf” is a 2′-fluoro-modified nucleoside, “n” is a 2′-O-methyl modified nucleoside, and “s” is a phosphorothioate or phosphate linkage. In some embodiments, the sense strand comprises modification pattern 31AS: 5′-nsNfsnnNfnNfnnNfnNfnNfnNfnnnsnsn-3′, wherein “Nf” is a 2′-fluoro-modified nucleoside, “n” is a 2′-O-methyl modified nucleoside, and “s” is a phosphorothioate or phosphate linkage. In some embodiments, the sense strand comprises modification pattern 32AS: 5′-nsNfsnnnNfNfnnNfnNfnNfnNfnnnsnsn-3′, wherein “Nf” is a 2′-fluoro-modified nucleoside, “n” is a 2′-O-methyl modified nucleoside, and “s” is a phosphorothioate or phosphate linkage. In some embodiments, the sense strand comprises modification pattern 33AS: 5′-nsNfsnnNfnNfNfnNfnnnNfnNfnnnsnsn-3′, wherein “Nf” is a 2′-fluoro-modified nucleoside, “n” is a 2′-O-methyl modified nucleoside, and “s” is a phosphorothioate or phosphate linkage. In some embodiments, the sense strand comprises modification pattern 34AS: 5′-nsNfsnnNfnNfNfnnnNfnNfnNfnnnsnsn-3′, wherein “Nf” is a 2′-fluoro-modified nucleoside, “n” is a 2′-O-methyl modified nucleoside, and “s” is a phosphorothioate or phosphate linkage. In some embodiments, the sense strand comprises modification pattern 35AS: 5′-nsNfsnnnNfNfnnNfnnnNfnNfnnnsnsn-3′, wherein “Nf” is a 2′-fluoro-modified nucleoside, “n” is a 2′-O-methyl modified nucleoside, and “s” is a phosphorothioate or phosphate linkage. In some embodiments, the sense strand comprises modification pattern 36AS: 5′-nsNfsnnnnNfNfnNfnnnNfnNfnnnsnsn-3′, wherein “Nf” is a 2′-fluoro-modified nucleoside, “n” is a 2′-O-methyl modified nucleoside, and “s” is a phosphorothioate or phosphate linkage. In some embodiments, the sense strand comprises modification pattern 37AS: 5′-nsNfsnnNfn[NUNA]nnNfnnnNfnNfinnsnsn-3′, wherein “Nf” is a 2′-fluoro-modified nucleoside, “n” is a 2′-O-methyl modified nucleoside, “s” is a phosphorothioate or phosphate linkage, and “[NUNA]” is an unlocked nucleic acid. In some embodiments, the sense strand comprises modification pattern 38AS: 5′-nsNfsnnNf[NUNA]NfnnNfnnnNfnNfnnnsnsn-3′, wherein “Nf” is a 2′-fluoro-modified nucleoside, “n” is a 2′-O-methyl modified nucleoside, “s” is a phosphorothioate or phosphate linkage, and “[NUNA]” is an unlocked nucleic acid. In some embodiments, the sense strand comprises modification pattern 39AS: 5′-5VPnsNfsnnNfnNfnnNfnnnNfnNfnnnsnsn-3′, wherein “Nf” is a 2′-fluoro-modified nucleoside, “n” is a 2′-O-methyl modified nucleoside, “s” is a phosphorothioate or phosphate linkage, and ad VP is a 5′-vinyl phosphonate. In some embodiments, the sense strand comprises modification pattern 40AS: 5′-5VPnsNfsnnNfnNfnnNfnNfnNfnNfnnnsnsn-3′, wherein “Nf” is a 2′-fluoro-modified nucleoside, “n” is a 2′-O-methyl modified nucleoside, “s” is a phosphorothioate or phosphate linkage, and ad VP is a 5′-vinyl phosphonate.

[0198] In some embodiments, the composition comprises an oligonucleotide that inhibits the expression of MTRES1, wherein the oligonucleotide comprises an siRNA comprising a sense strand and an antisense strand, wherein the sense strand comprises pattern 1S and the antisense strand comprises pattern 1AS, 2AS, 3AS, 4AS, 5AS, 6AS, 7AS, 8AS, 9AS, 10AS, 11AS, 12AS, 13AS, 14AS, 15AS, 16AS, 17AS, 18AS, 19AS, 20AS, 21AS, 22AS, 23AS, 24AS, 25AS, 26AS, 27AS, 28AS, 29AS, 30AS, 31AS, 32AS, 34AS, 35AS, 36AS, 37AS, 38AS, 39AS, or 40AS. In some embodiments, the sense strand comprises pattern 2S and the antisense strand comprises pattern 1AS, 2AS, 3AS, 4AS, 5AS, 6AS, 7AS, 8AS, 9AS, 10AS, 11AS, 12AS, 13AS, 14AS, 15AS, 16AS, 17AS, 18AS, 19AS, 20AS, 21AS, 22AS, 23AS, 24AS, 25AS, 26AS, 27AS, 28AS, 29AS, 30AS, 31AS, 32AS, 34AS, 35AS, 36AS, 37AS, 38AS, 39AS, or 40AS. In some embodiments, the sense strand comprises pattern 3S and the antisense strand comprises pattern 1AS, 2AS, 3AS, 4AS, 5AS, 6AS, 7AS, 8AS, 9AS, 10AS, 11AS, 12AS, 13AS, 14AS, 15AS, 16AS, 17AS, 18AS, 19AS, 20AS, 21AS, 22AS, 23AS, 24AS, 25AS, 26AS, 27AS, 28AS, 29AS, 30AS, 31AS, 32AS, 34AS, 35AS, 36AS, 37AS, 38AS, 39AS, or 40AS. In some embodiments, the sense strand comprises pattern 4S and the antisense strand comprises pattern 1AS, 2AS, 3AS, 4AS, 5AS, 6AS, 7AS, 8AS, 9AS, 10AS, 11AS, 12AS, 13AS, 14AS, 15AS, 16AS, 17AS, 18AS, 19AS, 20AS, 21AS, 22AS, 23AS, 24AS, 25AS, 26AS, 27AS, 28AS, 29AS, 30AS, 31AS, 32AS, 34AS, 35AS, 36AS, 37AS, 38AS, 39AS, or 40AS. In some embodiments, the sense strand comprises pattern 5S and the antisense strand comprises pattern 1AS, 2AS, 3AS, 4AS, 5AS, 6AS, 7AS, 8AS, 9AS, 10AS, 11AS, 12AS, 13AS, 14AS, 15AS, 16AS, 17AS, 18AS, 19AS, 20AS, 21AS, 22AS, 23AS, 24AS, 25AS, 26AS, 27AS, 28AS, 29AS, 30AS, 31AS, 32AS, 34AS, 35AS, 36AS, 37AS, 38AS, 39AS, or 40AS. In some embodiments, the sense strand comprises pattern 6S and the antisense strand comprises pattern 1AS, 2AS, 3AS, 4AS, 5AS, 6AS, 7AS, 8AS, 9AS, 10AS, 11AS, 12AS, 13AS, 14AS, 15AS, 16AS, 17AS, 18AS, 19AS, 20AS, 21AS, 22AS, 23AS, 24AS, 25AS, 26AS, 27AS, 28AS, 29AS, 30AS, 31AS, 32AS, 34AS, 35AS, 36AS, 37AS, 38AS, 39AS, or 40AS. In some embodiments, the sense strand comprises pattern 7S and the antisense strand comprises pattern 1AS, 2AS, 3AS, 4AS, 5AS, 6AS, 7AS, 8AS, 9AS, 10AS, 11AS, 12AS, 13AS, 14AS, 15AS, 16AS, 17AS, 18AS, 19AS, 20AS, 21AS, 22AS, 23AS, 24AS, 25AS, 26AS, 27AS, 28AS, 29AS, 30AS, 31AS, 32AS, 34AS, 35AS, 36AS, 37AS, 38AS, 39AS, or 40AS. In some embodiments, the sense strand comprises pattern 8S and the antisense strand comprises pattern 1AS, 2AS, 3AS, 4AS, 5AS, 6AS, 7AS, 8AS, 9AS, 10AS, 11AS, 12AS, 13AS, 14AS, 15AS, 16AS, 17AS, 18AS, 19AS, 20AS, 21AS, 22AS, 23AS, 24AS, 25AS, 26AS, 27AS, 28AS, 29AS, 30AS, 31AS, 32AS, 34AS, 35AS, 36AS, 37AS, 38AS, 39AS, or 40AS. In some embodiments, the sense strand comprises pattern 9S and the antisense strand comprises pattern 1AS, 2AS, 3AS, 4AS, 5AS, 6AS, 7AS, 8AS, 9AS, 10AS, 11AS, 12AS, 13AS, 14AS, 15AS, 16AS, 17AS, 18AS, 19AS, 20AS, 21AS, 22AS, 23AS, 24AS, 25AS, 26AS, 27AS, 28AS, 29AS, 30AS, 31AS, 32AS, 34AS, 35AS, 36AS, 37AS, 38AS, 39AS, or 40AS. In some embodiments, the sense strand comprises pattern 10S and the antisense strand comprises pattern 1AS, 2AS, 3AS, 4AS, 5AS, 6AS, 7AS, 8AS, 9AS, 10AS, 11AS, 12AS, 13AS, 14AS, 15AS, 16AS, 17AS, 18AS, 19AS, 20AS, 21AS, 22AS, 23AS, 24AS, 25AS, 26AS, 27AS, 28AS, 29AS, 30AS, 31AS, 32AS, 34AS, 35AS, 36AS, 37AS, 38AS, 39AS, or 40AS. In some embodiments, the sense strand comprises pattern 11S and the antisense strand comprises pattern 1AS, 2AS, 3AS, 4AS, 5AS, 6AS, 7AS, 8AS, 9AS, 10AS, 11AS, 12AS, 13AS, 14AS, 15AS, 16AS, 17AS, 18AS, 19AS, 20AS, 21AS, 22AS, 23AS, 24AS, 25AS, 26AS, 27AS, 28AS, 29AS, 30AS, 31AS, 32AS, 34AS, 35AS, 36AS, 37AS, 38AS, 39AS, or 40AS. In some embodiments, the sense strand comprises pattern 12S and the antisense strand comprises pattern 1AS, 2AS, 3AS, 4AS, 5AS, 6AS, 7AS, 8AS, 9AS, 10AS, 11AS, 12AS, 13AS, 14AS, 15AS, 16AS, 17AS, 18AS, 19AS, 20AS, 21AS, 22AS, 23AS, 24AS, 25AS, 26AS, 27AS, 28AS, 29AS, 30AS, 31AS, 32AS, 34AS, 35AS, 36AS, 37AS, 38AS, 39AS, or 40AS. In some embodiments, the sense strand comprises pattern 13S and the antisense strand comprises pattern 1AS, 2AS, 3AS, 4AS, 5AS, 6AS, 7AS, 8AS, 9AS, 10AS, 11AS, 12AS, 13AS, 14AS, 15AS, 16AS, 17AS, 18AS, 19AS, 20AS, 21AS, 22AS, 23AS, 24AS, 25AS, 26AS, 27AS, 28AS, 29AS, 30AS, 31AS, 32AS, 34AS, 35AS, 36AS, 37AS, 38AS, 39AS, or 40AS. In some embodiments, the sense strand comprises pattern 14S and the antisense strand comprises pattern 1AS, 2AS, 3AS, 4AS, 5AS, 6AS, 7AS, 8AS, 9AS, 10AS, 11AS, 12AS, 13AS, 14AS, 15AS, 16AS, 17AS, 18AS, 19AS, 20AS, 21AS, 22AS, 23AS, 24AS, 25AS, 26AS, 27AS, 28AS, 29AS, 30AS, 31AS, 32AS, 34AS, 35AS, 36AS, 37AS, 38AS, 39AS, or 40AS. In some embodiments, the sense strand comprises pattern 15S and the antisense strand comprises pattern 1AS, 2AS, 3AS, 4AS, 5AS, 6AS, 7AS, 8AS, 9AS, 10AS, 11AS, 12AS, 13AS, 14AS, 15AS, 16AS, 17AS, 18AS, 19AS, 20AS, 21AS, 22AS, 23AS, 24AS, 25AS, 26AS, 27AS, 28AS, 29AS, 30AS, 31AS, 32AS, 34AS, 35AS, 36AS, 37AS, 38AS, 39AS, or 40AS. In some embodiments, the sense strand comprises pattern 16S and the antisense strand comprises pattern 1AS, 2AS, 3AS, 4AS, 5AS, 6AS, 7AS, 8AS, 9AS, 10AS, 11AS, 12AS, 13AS, 14AS, 15AS, 16AS, 17AS, 18AS, 19AS, 20AS, 21AS, 22AS, 23AS, 24AS, 25AS, 26AS, 27AS, 28AS, 29AS, 30AS, 31AS, 32AS, 34AS, 35AS, 36AS, 37AS, 38AS, 39AS, or 40AS. In some embodiments, the sense strand comprises pattern 17S and the antisense strand comprises pattern 1AS, 2AS, 3AS, 4AS, 5AS, 6AS, 7AS, 8AS, 9AS, 10AS, 11AS, 12AS, 13AS, 14AS, 15AS, 16AS, 17AS, 18AS, 19AS, 20AS, 21AS, 22AS, 23AS, 24AS, 25AS, 26AS, 27AS, 28AS, 29AS, 30AS, 31AS, 32AS, 34AS, 35AS, 36AS, 37AS, 38AS, 39AS, or 40AS. In some embodiments, the sense strand comprises pattern 18S and the antisense strand comprises pattern 1AS, 2AS, 3AS, 4AS, 5AS, 6AS, 7AS, 8AS, 9AS, 10AS, 11AS, 12AS, 13AS, 14AS, 15AS, 16AS, 17AS, 18AS, 19AS, 20AS, 21AS, 22AS, 23AS, 24AS, 25AS, 26AS, 27AS, 28AS, 29AS, 30AS, 31AS, 32AS, 34AS, 35AS, 36AS, 37AS, 38AS, 39AS, or 40AS. In some embodiments, the sense strand comprises pattern 19S and the antisense strand comprises pattern 1AS, 2AS, 3AS, 4AS, 5AS, 6AS, 7AS, 8AS, 9AS, 10AS, 11AS, 12AS, 13AS, 14AS, 15AS, 16AS, 17AS, 18AS, 19AS, 20AS, 21AS, 22AS, 23AS, 24AS, 25AS, 26AS, 27AS, 28AS, 29AS, 30AS, 31AS, 32AS, 34AS, 35AS, 36AS, 37AS, 38AS, 39AS, or 40AS. In some embodiments, the sense strand comprises pattern 20S and the antisense strand comprises pattern 1AS, 2AS, 3AS, 4AS, 5AS, 6AS, 7AS, 8AS, 9AS, 10AS, 11AS, 12AS, 13AS, 14AS, 15AS, 16AS, 17AS, 18AS, 19AS, 20AS, 21AS, 22AS, 23AS, 24AS, 25AS, 26AS, 27AS, 28AS, 29AS, 30AS, 31AS, 32AS, 34AS, 35AS, 36AS, 37AS, 38AS, 39AS, or 40AS. In some embodiments, the sense strand comprises pattern 21S and the antisense strand comprises pattern 1AS, 2AS, 3AS, 4AS, 5AS, 6AS, 7AS, 8AS, 9AS, 10AS, 11AS, 12AS, 13AS, 14AS, 15AS, 16AS, 17AS, 18AS, 19AS, 20AS, 21AS, 22AS, 23AS, 24AS, 25AS, 26AS, 27AS, 28AS, 29AS, 30AS, 31AS, 32AS, 34AS, 35AS, 36AS, 37AS, 38AS, 39AS, or 40AS. In some embodiments, the sense strand comprises pattern 22S and the antisense strand comprises pattern 1AS, 2AS, 3AS, 4AS, 5AS, 6AS, 7AS, 8AS, 9AS, 10AS, 11AS, 12AS, 13AS, 14AS, 15AS, 16AS, 17AS, 18AS, 19AS, 20AS, 21AS, 22AS, 23AS, 24AS, 25AS, 26AS, 27AS, 28AS, 29AS, 30AS, 31AS, 32AS, 34AS, 35AS, 36AS, 37AS, 38AS, 39AS, or 40AS. In some embodiments, the sense strand comprises pattern 23S and the antisense strand comprises pattern 1AS, 2AS, 3AS, 4AS, 5AS, 6AS, 7AS, 8AS, 9AS, 10AS, 11AS, 12AS, 13AS, 14AS, 15AS, 16AS, 17AS, 18AS, 19AS, 20AS, 21AS, 22AS, 23AS, 24AS, 25AS, 26AS, 27AS, 28AS, 29AS, 30AS, 31AS, 32AS, 34AS, 35AS, 36AS, 37AS, 38AS, 39AS, or 40AS. In some embodiments, the sense strand comprises pattern 24S and the antisense strand comprises pattern 1AS, 2AS, 3AS, 4AS, 5AS, 6AS, 7AS, 8AS, 9AS, 10AS, 11AS, 12AS, 13AS, 14AS, 15AS, 16AS, 17AS, 18AS, 19AS, 20AS, 21AS, 22AS, 23AS, 24AS, 25AS, 26AS, 27AS, 28AS, 29AS, 30AS, 31AS, 32AS, 34AS, 35AS, 36AS, 37AS, 38AS, 39AS, or 40AS. In some embodiments, the sense strand comprises pattern 25S and the antisense strand comprises pattern 1AS, 2AS, 3AS, 4AS, 5AS, 6AS, 7AS, 8AS, 9AS, 10AS, 11AS, 12AS, 13AS, 14AS, 15AS, 16AS, 17AS, 18AS, 19AS, 20AS, 21AS, 22AS, 23AS, 24AS, 25AS, 26AS, 27AS, 28AS, 29AS, 30AS, 31AS, 32AS, 34AS, 35AS, 36AS, 37AS, 38AS, 39AS, or 40AS. In some embodiments, the sense strand comprises pattern 26S and the antisense strand comprises pattern 1AS, 2AS, 3AS, 4AS, 5AS, 6AS, 7AS, 8AS, 9AS, 10AS, 11AS, 12AS, 13AS, 14AS, 15AS, 16AS, 17AS, 18AS, 19AS, 20AS, 21AS, 22AS, 23AS, 24AS, 25AS, 26AS, 27AS, 28AS, 29AS, 30AS, 31AS, 32AS, 34AS, 35AS, 36AS, 37AS, 38AS, 39AS, or 40AS. In some embodiments, the sense strand comprises pattern 27S and the antisense strand comprises pattern 1AS, 2AS, 3AS, 4AS, 5AS, 6AS, 7AS, 8AS, 9AS, 10AS, 11AS, 12AS, 13AS, 14AS, 15AS, 16AS, 17AS, 18AS, 19AS, 20AS, 21AS, 22AS, 23AS, 24AS, 25AS, 26AS, 27AS, 28AS, 29AS, 30AS, 31AS, 32AS, 34AS, 35AS, 36AS, 37AS, 38AS, 39AS, or 40AS. In some embodiments, the sense strand comprises pattern 28S and the antisense strand comprises pattern 1AS, 2AS, 3AS, 4AS, 5AS, 6AS, 7AS, 8AS, 9AS, 10AS, 11AS, 12AS, 13AS, 14AS, 15AS, 16AS, 17AS, 18AS, 19AS, 20AS, 21AS, 22AS, 23AS, 24AS, 25AS, 26AS, 27AS, 28AS, 29AS, 30AS, 31AS, 32AS, 34AS, 35AS, 36AS, 37AS, 38AS, 39AS, or 40AS. In some embodiments, the sense strand comprises pattern 29S and the antisense strand comprises pattern 1AS, 2AS, 3AS, 4AS, 5AS, 6AS, 7AS, 8AS, 9AS, 10AS, 11AS, 12AS, 13AS, 14AS, 15AS, 16AS, 17AS, 18AS, 19AS, 20AS, 21AS, 22AS, 23AS, 24AS, 25AS, 26AS, 27AS, 28AS, 29AS, 30AS, 31AS, 32AS, 34AS, 35AS, 36AS, 37AS, 38AS, 39AS, or 40AS. In some embodiments, the sense strand comprises pattern 30S and the antisense strand comprises pattern 1AS, 2AS, 3AS, 4AS, 5AS, 6AS, 7AS, 8AS, 9AS, 10AS, 11AS, 12AS, 13AS, 14AS, 15AS, 16AS, 17AS, 18AS, 19AS, 20AS, 21AS, 22AS, 23AS, 24AS, 25AS, 26AS, 27AS, 28AS, 29AS, 30AS, 31AS, 32AS, 34AS, 35AS, 36AS, 37AS, 38AS, 39AS, or 40AS. In some embodiments, the sense strand comprises pattern 31S and the antisense strand comprises pattern 1AS, 2AS, 3AS, 4AS, 5AS, 6AS, 7AS, 8AS, 9AS, 10AS, 11AS, 12AS, 13AS, 14AS, 15AS, 16AS, 17AS, 18AS, 19AS, 20AS, 21AS, 22AS, 23AS, 24AS, 25AS, 26AS, 27AS, 28AS, 29AS, 30AS, 31AS, 32AS, 34AS, 35AS, 36AS, 37AS, 38AS, 39AS, or 40AS. In some embodiments, the sense strand comprises pattern 32S and the antisense strand comprises pattern 1AS, 2AS, 3AS, 4AS, 5AS, 6AS, 7AS, 8AS, 9AS, 10AS, 11AS, 12AS, 13AS, 14AS, 15AS, 16AS, 17AS, 18AS, 19AS, 20AS, 21AS, 22AS, 23AS, 24AS, 25AS, 26AS, 27AS, 28AS, 29AS, 30AS, 31AS, 32AS, 34AS, 35AS, 36AS, 37AS, 38AS, 39AS, or 40AS. In some embodiments, the sense strand comprises pattern 33S and the antisense strand comprises pattern 1AS, 2AS, 3AS, 4AS, 5AS, 6AS, 7AS, 8AS, 9AS, 10AS, 11AS, 12AS, 13AS, 14AS, 15AS, 16AS, 17AS, 18AS, 19AS, 20AS, 21AS, 22AS, 23AS, 24AS, 25AS, 26AS, 27AS, 28AS, 29AS, 30AS, 31AS, 32AS, 34AS, 35AS, 36AS, 37AS, 38AS, 39AS, or 40AS. In some embodiments, the sense strand comprises pattern 34S and the antisense strand comprises pattern 1AS, 2AS, 3AS, 4AS, 5AS, 6AS, 7AS, 8AS, 9AS, 10AS, 11AS, 12AS, 13AS, 14AS, 15AS, 16AS, 17AS, 18AS, 19AS, 20AS, 21AS, 22AS, 23AS, 24AS, 25AS, 26AS, 27AS, 28AS, 29AS, 30AS, 31AS, 32AS, 34AS, 35AS, 36AS, 37AS, 38AS, 39AS, or 40AS. In some embodiments, the sense strand comprises pattern 35S and the antisense strand comprises pattern 1AS, 2AS, 3AS, 4AS, 5AS, 6AS, 7AS, 8AS, 9AS, 10AS, 11AS, 12AS, 13AS, 14AS, 15AS, 16AS, 17AS, 18AS, 19AS, 20AS, 21AS, 22AS, 23AS, 24AS, 25AS, 26AS, 27AS, 28AS, 29AS, 30AS, 31AS, 32AS, 34AS, 35AS, 36AS, 37AS, 38AS, 39AS, or 40AS. In some embodiments, the sense strand comprises pattern 36S and the antisense strand comprises pattern 1AS, 2AS, 3AS, 4AS, 5AS, 6AS, 7AS, 8AS, 9AS, 10AS, 11AS, 12AS, 13AS, 14AS, 15AS, 16AS, 17AS, 18AS, 19AS, 20AS, 21AS, 22AS, 23AS, 24AS, 25AS, 26AS, 27AS, 28AS, 29AS, 30AS, 31AS, 32AS, 34AS, 35AS, 36AS, 37AS, 38AS, 39AS, or 40AS. In some embodiments, the sense strand comprises pattern 37S and the antisense strand comprises pattern 1AS, 2AS, 3AS, 4AS, 5AS, 6AS, 7AS, 8AS, 9AS, 10AS, 11AS, 12AS, 13AS, 14AS, 15AS, 16AS, 17AS, 18AS, 19AS, 20AS, 21AS, 22AS, 23AS, 24AS, 25AS, 26AS, 27AS, 28AS, 29AS, 30AS, 31AS, 32AS, 34AS, 35AS, 36AS, 37AS, 38AS, 39AS, or 40AS. In some embodiments, the sense strand comprises pattern 38S and the antisense strand comprises pattern 1AS, 2AS, 3AS, 4AS, 5AS, 6AS, 7AS, 8AS, 9AS, 10AS, 11AS, 12AS, 13AS, 14AS, 15AS, 16AS, 17AS, 18AS, 19AS, 20AS, 21AS, 22AS, 23AS, 24AS, 25AS, 26AS, 27AS, 28AS, 29AS, 30AS, 31AS, 32AS, 34AS, 35AS, 36AS, 37AS, 38AS, 39AS, or 40AS. In some embodiments, the sense strand comprises pattern 39S and the antisense strand comprises pattern 1AS, 2AS, 3AS, 4AS, 5AS, 6AS, 7AS, 8AS, 9AS, 10AS, 11AS, 12AS, 13AS, 14AS, 15AS, 16AS, 17AS, 18AS, 19AS, 20AS, 21AS, 22AS, 23AS, 24AS, 25AS, 26AS, 27AS, 28AS, 29AS, 30AS, 31AS, 32AS, 34AS, 35AS, 36AS, 37AS, 38AS, 39AS, or 40AS. In some embodiments, the sense strand comprises pattern 40S and the antisense strand comprises pattern 1AS, 2AS, 3AS, 4AS, 5AS, 6AS, 7AS, 8AS, 9AS, 10AS, 11AS, 12AS, 13AS, 14AS, 15AS, 16AS, 17AS, 18AS, 19AS, 20AS, 21AS, 22AS, 23AS, 24AS, 25AS, 26AS, 27AS, 28AS, 29AS, 30AS, 31AS, 32AS, 34AS, 35AS, 36AS, 37AS, 38AS, 39AS, or 40AS. In some embodiments, the sense strand comprises pattern 41S and the antisense strand comprises pattern 1AS, 2AS, 3AS, 4AS, 5AS, 6AS, 7AS, 8AS, 9AS, 10AS, 11AS, 12AS, 13AS, 14AS, 15AS, 16AS, 17AS, 18AS, 19AS, 20AS, 21AS, 22AS, 23AS, 24AS, 25AS, 26AS, 27AS, 28AS, 29AS, 30AS, 31AS, 32AS, 34AS, 35AS, 36AS, 37AS, 38AS, 39AS, or 40AS. In some embodiments, the sense strand comprises pattern 42S and the antisense strand comprises pattern 1AS, 2AS, 3AS, 4AS, 5AS, 6AS, 7AS, 8AS, 9AS, 10AS, 11AS, 12AS, 13AS, 14AS, 15AS, 16AS, 17AS, 18AS, 19AS, 20AS, 21AS, 22AS, 23AS, 24AS, 25AS, 26AS, 27AS, 28AS, 29AS, 30AS, 31AS, 32AS, 34AS, 35AS, 36AS, 37AS, 38AS, 39AS, or 40AS. In some embodiments, the sense strand comprises pattern 43S and the antisense strand comprises pattern 1AS, 2AS, 3AS, 4AS, 5AS, 6AS, 7AS, 8AS, 9AS, 10AS, 11AS, 12AS, 13AS, 14AS, 15AS, 16AS, 17AS, 18AS, 19AS, 20AS, 21AS, 22AS, 23AS, 24AS, 25AS, 26AS, 27AS, 28AS, 29AS, 30AS, 31AS, 32AS, 34AS, 35AS, 36AS, 37AS, 38AS, 39AS, or 40AS. In some embodiments, the sense strand comprises pattern 44S and the antisense strand comprises pattern 1AS, 2AS, 3AS, 4AS, 5AS, 6AS, 7AS, 8AS, 9AS, 10AS, 11AS, 12AS, 13AS, 14AS, 15AS, 16AS, 17AS, 18AS, 19AS, 20AS, 21AS, 22AS, 23AS, 24AS, 25AS, 26AS, 27AS, 28AS, 29AS, 30AS, 31AS, 32AS, 34AS, 35AS, 36AS, 37AS, 38AS, 39AS, or 40AS. In some embodiments, the sense strand comprises pattern 45S and the antisense strand comprises pattern 1AS, 2AS, 3AS, 4AS, 5AS, 6AS, 7AS, 8AS, 9AS, 10AS, 11AS, 12AS, 13AS, 14AS, 15AS, 16AS, 17AS, 18AS, 19AS, 20AS, 21AS, 22AS, 23AS, 24AS, 25AS, 26AS, 27AS, 28AS, 29AS, 30AS, 31AS, 32AS, 34AS, 35AS, 36AS, 37AS, 38AS, 39AS, or 40AS. In some embodiments, the sense strand comprises pattern 46S and the antisense strand comprises pattern 1AS, 2AS, 3AS, 4AS, 5AS, 6AS, 7AS, 8AS, 9AS, 10AS, 11AS, 12AS, 13AS, 14AS, 15AS, 16AS, 17AS, 18AS, 19AS, 20AS, 21AS, 22AS, 23AS, 24AS, 25AS, 26AS, 27AS, 28AS, 29AS, 30AS, 31AS, 32AS, 34AS, 35AS, 36AS, 37AS, 38AS, 39AS, or 40AS. In some embodiments, the sense strand comprises pattern 47S and the antisense strand comprises pattern 1AS, 2AS, 3AS, 4AS, 5AS, 6AS, 7AS, 8AS, 9AS, 10AS, 11AS, 12AS, 13AS, 14AS, 15AS, 16AS, 17AS, 18AS, 19AS, 20AS, 21AS, 22AS, 23AS, 24AS, 25AS, 26AS, 27AS, 28AS, 29AS, 30AS, 31AS, 32AS, 34AS, 35AS, 36AS, 37AS, 38AS, 39AS, or 40AS. In some embodiments, the sense strand comprises pattern 48S and the antisense strand comprises pattern 1AS, 2AS, 3AS, 4AS, 5AS, 6AS, 7AS, 8AS, 9AS, 10AS, 11AS, 12AS, 13AS, 14AS, 15AS, 16AS, 17AS, 18AS, 19AS, 20AS, 21AS, 22AS, 23AS, 24AS, 25AS, 26AS, 27AS, 28AS, 29AS, 30AS, 31AS, 32AS, 34AS, 35AS, 36AS, 37AS, 38AS, 39AS, or 40AS. In some embodiments, the sense strand comprises pattern 49S and the antisense strand comprises pattern 1AS, 2AS, 3AS, 4AS, 5AS, 6AS, 7AS, 8AS, 9AS, 10AS, 11AS, 12AS, 13AS, 14AS, 15AS, 16AS, 17AS, 18AS, 19AS, 20AS, 21AS, 22AS, 23AS, 24AS, 25AS, 26AS, 27AS, 28AS, 29AS, 30AS, 31AS, 32AS, 34AS, 35AS, 36AS, 37AS, 38AS, 39AS, or 40AS. In some embodiments, the sense strand comprises pattern 50S and the antisense strand comprises pattern 1AS, 2AS, 3AS, 4AS, 5AS, 6AS, 7AS, 8AS, 9AS, 10AS, 11AS, 12AS, 13AS, 14AS, 15AS, 16AS, 17AS, 18AS, 19AS, 20AS, 21AS, 22AS, 23AS, 24AS, 25AS, 26AS, 27AS, 28AS, 29AS, 30AS, 31AS, 32AS, 34AS, 35AS, 36AS, 37AS, 38AS, 39AS, or 40AS. In some embodiments, the sense strand comprises pattern 51S and the antisense strand comprises pattern 1AS, 2AS, 3AS, 4AS, 5AS, 6AS, 7AS, 8AS, 9AS, 10AS, 11AS, 12AS, 13AS, 14AS, 15AS, 16AS, 17AS, 18AS, 19AS, 20AS, 21AS, 22AS, 23AS, 24AS, 25AS, 26AS, 27AS, 28AS, 29AS, 30AS, 31AS, 32AS, 34AS, 35AS, 36AS, 37AS, 38AS, 39AS, or 40AS. In some embodiments, the sense strand comprises pattern 52S and the antisense strand comprises pattern 1AS, 2AS, 3AS, 4AS, 5AS, 6AS, 7AS, 8AS, 9AS, 10AS, 11AS, 12AS, 13AS, 14AS, 15AS, 16AS, 17AS, 18AS, 19AS, 20AS, 21AS, 22AS, 23AS, 24AS, 25AS, 26AS, 27AS, 28AS, 29AS, 30AS, 31AS, 32AS, 34AS, 35AS, 36AS, 37AS, 38AS, 39AS, or 40AS. In some embodiments, the sense strand comprises pattern 53S and the antisense strand comprises pattern 1AS, 2AS, 3AS, 4AS, 5AS, 6AS, 7AS, 8AS, 9AS, 10AS, 11AS, 12AS, 13AS, 14AS, 15AS, 16AS, 17AS, 18AS, 19AS, 20AS, 21AS, 22AS, 23AS, 24AS, 25AS, 26AS, 27AS, 28AS, 29AS, 30AS, 31AS, 32AS, 34AS, 35AS, 36AS, 37AS, 38AS, 39AS, or 40AS. In some embodiments, the sense strand comprises pattern 54S and the antisense strand comprises pattern 1AS, 2AS, 3AS, 4AS, 5AS, 6AS, 7AS, 8AS, 9AS, 10AS, 11AS, 12AS, 13AS, 14AS, 15AS, 16AS, 17AS, 18AS, 19AS, 20AS, 21AS, 22AS, 23AS, 24AS, 25AS, 26AS, 27AS, 28AS, 29AS, 30AS, 31AS, 32AS, 34AS, 35AS, 36AS, 37AS, 38AS, 39AS, or 40AS. In some embodiments, the sense strand comprises pattern 55S and the antisense strand comprises pattern 1AS, 2AS, 3AS, 4AS, 5AS, 6AS, 7AS, 8AS, 9AS, 10AS, 11AS, 12AS, 13AS, 14AS, 15AS, 16AS, 17AS, 18AS, 19AS, 20AS, 21AS, 22AS, 23AS, 24AS, 25AS, 26AS, 27AS, 28AS, 29AS, 30AS, 31AS, 32AS, 34AS, 35AS, 36AS, 37AS, 38AS, 39AS, or 40AS. In some embodiments, the sense strand comprises pattern 56S and the antisense strand comprises pattern 1AS, 2AS, 3AS, 4AS, 5AS, 6AS, 7AS, 8AS, 9AS, 10AS, 11AS, 12AS, 13AS, 14AS, 15AS, 16AS, 17AS, 18AS, 19AS, 20AS, 21AS, 22AS, 23AS, 24AS, 25AS, 26AS, 27AS, 28AS, 29AS, 30AS, 31AS, 32AS, 34AS, 35AS, 36AS, 37AS, 38AS, 39AS, or 40AS. In some embodiments, the sense strand comprises pattern 57S and the antisense strand comprises pattern 1AS, 2AS, 3AS, 4AS, 5AS, 6AS, 7AS, 8AS, 9AS, 10AS, 11AS, 12AS, 13AS, 14AS, 15AS, 16AS, 17AS, 18AS, 19AS, 20AS, 21AS, 22AS, 23AS, 24AS, 25AS, 26AS, 27AS, 28AS, 29AS, 30AS, 31AS, 32AS, 34AS, 35AS, 36AS, 37AS, 38AS, 39AS, or 40AS. In some embodiments, the sense strand comprises pattern 58S and the antisense strand comprises pattern 1AS, 2AS, 3AS, 4AS, 5AS, 6AS, 7AS, 8AS, 9AS, 10AS, 11AS, 12AS, 13AS, 14AS, 15AS, 16AS, 17AS, 18AS, 19AS, 20AS, 21AS, 22AS, 23AS, 24AS, 25AS, 26AS, 27AS, 28AS, 29AS, 30AS, 31AS, 32AS, 34AS, 35AS, 36AS, 37AS, 38AS, 39AS, or 40AS. In some embodiments, the sense strand comprises pattern 59S and the antisense strand comprises pattern 1AS, 2AS, 3AS, 4AS, 5AS, 6AS, 7AS, 8AS, 9AS, 10AS, 11AS, 12AS, 13AS, 14AS, 15AS, 16AS, 17AS, 18AS, 19AS, 20AS, 21AS, 22AS, 23AS, 24AS, 25AS, 26AS, 27AS, 28AS, 29AS, 30AS, 31AS, 32AS, 34AS, 35AS, 36AS, 37AS, 38AS, 39AS, or 40AS. In some embodiments, the sense strand comprises pattern 60S and the antisense strand comprises pattern 1AS, 2AS, 3AS, 4AS, 5AS, 6AS, 7AS, 8AS, 9AS, 10AS, 11AS, 12AS, 13AS, 14AS, 15AS, 16AS, 17AS, 18AS, 19AS, 20AS, 21AS, 22AS, 23AS, 24AS, 25AS, 26AS, 27AS, 28AS, 29AS, 30AS, 31AS, 32AS, 34AS, 35AS, 36AS, 37AS, 38AS, 39AS, or 40AS. In some embodiments, the sense strand comprises pattern 61S and the antisense strand comprises pattern 1AS, 2AS, 3AS, 4AS, 5AS, 6AS, 7AS, 8AS, 9AS, 10AS, 11AS, 12AS, 13AS, 14AS, 15AS, 16AS, 17AS, 18AS, 19AS, 20AS, 21AS, 22AS, 23AS, 24AS, 25AS, 26AS, 27AS, 28AS, 29AS, 30AS, 31AS, 32AS, 34AS, 35AS, 36AS, 37AS, 38AS, 39AS, or 40AS. In some embodiments, the sense strand comprises pattern 62S and the antisense strand comprises pattern 1AS, 2AS, 3AS, 4AS, 5AS, 6AS, 7AS, 8AS, 9AS, 10AS, 11AS, 12AS, 13AS, 14AS, 15AS, 16AS, 17AS, 18AS, 19AS, 20AS, 21AS, 22AS, 23AS, 24AS, 25AS, 26AS, 27AS, 28AS, 29AS, 30AS, 31AS, 32AS, 34AS, 35AS, 36AS, 37AS, 38AS, 39AS, or 40AS. In some embodiments, the sense strand comprises pattern 63S and the antisense strand comprises pattern 1AS, 2AS, 3AS, 4AS, 5AS, 6AS, 7AS, 8AS, 9AS, 10AS, 11AS, 12AS, 13AS, 14AS, 15AS, 16AS, 17AS, 18AS, 19AS, 20AS, 21AS, 22AS, 23AS, 24AS, 25AS, 26AS, 27AS, 28AS, 29AS, 30AS, 31AS, 32AS, 34AS, 35AS, 36AS, 37AS, 38AS, 39AS, or 40AS. In some embodiments, the sense strand comprises pattern 64S and the antisense strand comprises pattern 1AS, 2AS, 3AS, 4AS, 5AS, 6AS, 7AS, 8AS, 9AS, 10AS, 11AS, 12AS, 13AS, 14AS, 15AS, 16AS, 17AS, 18AS, 19AS, 20AS, 21AS, 22AS, 23AS, 24AS, 25AS, 26AS, 27AS, 28AS, 29AS, 30AS, 31AS, 32AS, 34AS, 35AS, 36AS, 37AS, 38AS, 39AS, or 40AS. In some embodiments, the sense strand comprises pattern 65S and the antisense strand comprises pattern 1AS, 2AS, 3AS, 4AS, 5AS, 6AS, 7AS, 8AS, 9AS, 10AS, 11AS, 12AS, 13AS, 14AS, 15AS, 16AS, 17AS, 18AS, 19AS, 20AS, 21AS, 22AS, 23AS, 24AS, 25AS, 26AS, 27AS, 28AS, 29AS, 30AS, 31AS, 32AS, 34AS, 35AS, 36AS, 37AS, 38AS, 39AS, or 40AS.

[0199] In some embodiments, the sense strand comprises pattern 1S, 2S, 3S, 4S, 5S, 6S, 7S, 8S, 9S, 10S, 11S, 12S, 13S, 14S, 15S, 16S, 17S, 18S, 19S, 20S, 21S, 22S, 23S, 24S, 25S, 26S, 27S, 28S, 29S, 30S, 31S, 32S, 33S, 33S, 34S, 35S, 36S, 37S, 38S, 39S, 40S, 41S, 42S, 43S, 44S, 44S, 45S, 46S, 47S, 48S, 49S, 50S, 51S, 52S, 53S, 54S, 55S, 56S, 57S, 58S, 59S, 60S, 61S, 62S, 63S, 64S, or 65S and the antisense strand comprises pattern 1AS. In some embodiments, the sense strand comprises pattern 1S, 2S, 3S, 4S, 5S, 6S, 7S, 8S, 9S, 10S, 11S, 12S, 13S, 14S, 15S, 16S, 17S, 18S, 19S, 20S, 21S, 22S, 23S, 24S, 25S, 26S, 27S, 28S, 29S, 30S, 31S, 32S, 33S, 33S, 34S, 35S, 36S, 37S, 38S, 39S, 40S, 41S, 42S, 43S, 44S, 44S, 45S, 46S, 47S, 48S, 49S, 50S, 51S, 52S, 53S, 54S, 55S, 56S, 57S, 58S, 59S, 60S, 61S, 62S, 63S, 64S, or 65S and the antisense strand comprises pattern 2AS. In some embodiments, the sense strand comprises pattern 1S, 2S, 3S, 4S, 5S, 6S, 7S, 8S, 9S, 10S, 11S, 12S, 13S, 14S, 15S, 16S, 17S, 18S, 19S, 20S, 21S, 22S, 23S, 24S, 25S, 26S, 27S, 28S, 29S, 30S, 31S, 32S, 33S, 33S, 34S, 35S, 36S, 37S, 38S, 39S, 40S, 41S, 42S, 43S, 44S, 44S, 45S, 46S, 47S, 48S, 49S, 50S, 51S, 52S, 53S, 54S, 55S, 56S, 57S, 58S, 59S, 60S, 61S, 62S, 63S, 64S, or 65S and the antisense strand comprises pattern 3AS. In some embodiments, the sense strand comprises pattern 1S, 2S, 3S, 4S, 5S, 6S, 7S, 8S, 9S, 10S, 11S, 12S, 13S, 14S, 15S, 16S, 17S, 18S, 19S, 20S, 21S, 22S, 23S, 24S, 25S, 26S, 27S, 28S, 29S, 30S, 31S, 32S, 33S, 33S, 34S, 35S, 36S, 37S, 38S, 39S, 40S, 41S, 42S, 43S, 44S, 44S, 45S, 46S, 47S, 48S, 49S, 50S, 51S, 52S, 53S, 54S, 55S, 56S, 57S, 58S, 59S, 60S, 61S, 62S, 63S, 64S, or 65S and the antisense strand comprises pattern 4AS. In some embodiments, the sense strand comprises pattern 1S, 2S, 3S, 4S, 5S, 6S, 7S, 8S, 9S, 10S, 11S, 12S, 13S, 14S, 15S, 16S, 17S, 18S, 19S, 20S, 21S, 22S, 23S, 24S, 25S, 26S, 27S, 28S, 29S, 30S, 31S, 32S, 33S, 33S, 34S, 35S, 36S, 37S, 38S, 39S, 40S, 41S, 42S, 43S, 44S, 44S, 45S, 46S, 47S, 48S, 49S, 50S, 51S, 52S, 53S, 54S, 55S, 56S, 57S, 58S, 59S, 60S, 61S, 62S, 63S, 64S, or 65S and the antisense strand comprises pattern 5AS. In some embodiments, the sense strand comprises pattern 1S, 2S, 3S, 4S, 5S, 6S, 7S, 8S, 9S, 10S, 11S, 12S, 13S, 14S, 15S, 16S, 17S, 18S, 19S, 20S, 21S, 22S, 23S, 24S, 25S, 26S, 27S, 28S, 29S, 30S, 31S, 32S, 33S, 33S, 34S, 35S, 36S, 37S, 38S, 39S, 40S, 41S, 42S, 43S, 44S, 44S, 45S, 46S, 47S, 48S, 49S, 50S, 51S, 52S, 53S, 54S, 55S, 56S, 57S, 58S, 59S, 60S, 61S, 62S, 63S, 64S, or 65S and the antisense strand comprises pattern 6AS. In some embodiments, the sense strand comprises pattern 1S, 2S, 3S, 4S, 5S, 6S, 7S, 8S, 9S, 10S, 11S, 12S, 13S, 14S, 15S, 16S, 17S, 18S, 19S, 20S, 21S, 22S, 23S, 24S, 25S, 26S, 27S, 28S, 29S, 30S, 31S, 32S, 33S, 33S, 34S, 35S, 36S, 37S, 38S, 39S, 40S, 41S, 42S, 43S, 44S, 44S, 45S, 46S, 47S, 48S, 49S, 50S, 51S, 52S, 53S, 54S, 55S, 56S, 57S, 58S, 59S, 60S, 61S, 62S, 63S, 64S, or 65S and the antisense strand comprises pattern 7AS. In some embodiments, the sense strand comprises pattern 1S, 2S, 3S, 4S, 5S, 6S, 7S, 8S, 9S, 10S, 11S, 12S, 13S, 14S, 15S, 16S, 17S, 18S, 19S, 20S, 21S, 22S, 23S, 24S, 25S, 26S, 27S, 28S, 29S, 30S, 31S, 32S, 33S, 33S, 34S, 35S, 36S, 37S, 38S, 39S, 40S, 41S, 42S, 43S, 44S, 44S, 45S, 46S, 47S, 48S, 49S, 50S, 51S, 52S, 53S, 54S, 55S, 56S, 57S, 58S, 59S, 60S, 61S, 62S, 63S, 64S, or 65S and the antisense strand comprises pattern 8AS. In some embodiments, the sense strand comprises pattern 1S, 2S, 3S, 4S, 5S, 6S, 7S, 8S, 9S, 10S, 11S, 12S, 13S, 14S, 15S, 16S, 17S, 18S, 19S, 20S, 21S, 22S, 23S, 24S, 25S, 26S, 27S, 28S, 29S, 30S, 31S, 32S, 33S, 33S, 34S, 35S, 36S, 37S, 38S, 39S, 40S, 41S, 42S, 43S, 44S, 44S, 45S, 46S, 47S, 48S, 49S, 50S, 51S, 52S, 53S, 54S, 55S, 56S, 57S, 58S, 59S, 60S, 61S, 62S, 63S, 64S, or 65S and the antisense strand comprises pattern 9AS. In some embodiments, the sense strand comprises pattern 1S, 2S, 3S, 4S, 5S, 6S, 7S, 8S, 9S, 10S, 11S, 12S, 13S, 14S, 15S, 16S, 17S, 18S, 19S, 20S, 21S, 22S, 23S, 24S, 25S, 26S, 27S, 28S, 29S, 30S, 31S, 32S, 33S, 33S, 34S, 35S, 36S, 37S, 38S, 39S, 40S, 41S, 42S, 43S, 44S, 44S, 45S, 46S, 47S, 48S, 49S, 50S, 51S, 52S, 53S, 54S, 55S, 56S, 57S, 58S, 59S, 60S, 61S, 62S, 63S, 64S, or 65S and the antisense strand comprises pattern 10AS. In some embodiments, the sense strand comprises pattern 1S, 2S, 3S, 4S, 5S, 6S, 7S, 8S, 9S, 10S, 11S, 12S, 13S, 14S, 15S, 16S, 17S, 18S, 19S, 20S, 21S, 22S, 23S, 24S, 25S, 26S, 27S, 28S, 29S, 30S, 31S, 32S, 33S, 33S, 34S, 35S, 36S, 37S, 38S, 39S, 40S, 41S, 42S, 43S, 44S, 44S, 45S, 46S, 47S, 48S, 49S, 50S, 51S, 52S, 53S, 54S, 55S, 56S, 57S, 58S, 59S, 60S, 61S, 62S, 63S, 64S, or 65S and the antisense strand comprises pattern 11AS. In some embodiments, the sense strand comprises pattern 1S, 2S, 3S, 4S, 5S, 6S, 7S, 8S, 9S, 10S, 11S, 12S, 13S, 14S, 15S, 16S, 17S, 18S, 19S, 20S, 21S, 22S, 23S, 24S, 25S, 26S, 27S, 28S, 29S, 30S, 31S, 32S, 33S, 33S, 34S, 35S, 36S, 37S, 38S, 39S, 40S, 41S, 42S, 43S, 44S, 44S, 45S, 46S, 47S, 48S, 49S, 50S, 51S, 52S, 53S, 54S, 55S, 56S, 57S, 58S, 59S, 60S, 61S, 62S, 63S, 64S, or 65S and the antisense strand comprises pattern 12AS. In some embodiments, the sense strand comprises pattern 1S, 2S, 3S, 4S, 5S, 6S, 7S, 8S, 9S, 10S, 11S, 12S, 13S, 14S, 15S, 16S, 17S, 18S, 19S, 20S, 21S, 22S, 23S, 24S, 25S, 26S, 27S, 28S, 29S, 30S, 31S, 32S, 33S, 33S, 34S, 35S, 36S, 37S, 38S, 39S, 40S, 41S, 42S, 43S, 44S, 44S, 45S, 46S, 47S, 48S, 49S, 50S, 51S, 52S, 53S, 54S, 55S, 56S, 57S, 58S, 59S, 60S, 61S, 62S, 63S, 64S, or 65S and the antisense strand comprises pattern 13AS. In some embodiments, the sense strand comprises pattern 1S, 2S, 3S, 4S, 5S, 6S, 7S, 8S, 9S, 10S, 11S, 12S, 13S, 14S, 15S, 16S, 17S, 18S, 19S, 20S, 21S, 22S, 23S, 24S, 25S, 26S, 27S, 28S, 29S, 30S, 31S, 32S, 33S, 33S, 34S, 35S, 36S, 37S, 38S, 39S, 40S, 41S, 42S, 43S, 44S, 44S, 45S, 46S, 47S, 48S, 49S, 50S, 51S, 52S, 53S, 54S, 55S, 56S, 57S, 58S, 59S, 60S, 61S, 62S, 63S, 64S, or 65S and the antisense strand comprises pattern 14AS. In some embodiments, the sense strand comprises pattern 1S, 2S, 3S, 4S, 5S, 6S, 7S, 8S, 9S, 10S, 11S, 12S, 13S, 14S, 15S, 16S, 17S, 18S, 19S, 20S, 21S, 22S, 23S, 24S, 25S, 26S, 27S, 28S, 29S, 30S, 31S, 32S, 33S, 33S, 34S, 35S, 36S, 37S, 38S, 39S, 40S, 41S, 42S, 43S, 44S, 44S, 45S, 46S, 47S, 48S, 49S, 50S, 51S, 52S, 53S, 54S, 55S, 56S, 57S, 58S, 59S, 60S, 61S, 62S, 63S, 64S, or 65S and the antisense strand comprises pattern 15AS. In some embodiments, the sense strand comprises pattern 1S, 2S, 3S, 4S, 5S, 6S, 7S, 8S, 9S, 10S, 11S, 12S, 13S, 14S, 15S, 16S, 17S, 18S, 19S, 20S, 21S, 22S, 23S, 24S, 25S, 26S, 27S, 28S, 29S, 30S, 31S, 32S, 33S, 33S, 34S, 35S, 36S, 37S, 38S, 39S, 40S, 41S, 42S, 43S, 44S, 44S, 45S, 46S, 47S, 48S, 49S, 50S, 51S, 52S, 53S, 54S, 55S, 56S, 57S, 58S, 59S, 60S, 61S, 62S, 63S, 64S, or 65S and the antisense strand comprises pattern 16AS. In some embodiments, the sense strand comprises pattern 1S, 2S, 3S, 4S, 5S, 6S, 7S, 8S, 9S, 10S, 11S, 12S, 13S, 14S, 15S, 16S, 17S, 18S, 19S, 20S, 21S, 22S, 23S, 24S, 25S, 26S, 27S, 28S, 29S, 30S, 31S, 32S, 33S, 33S, 34S, 35S, 36S, 37S, 38S, 39S, 40S, 41S, 42S, 43S, 44S, 44S, 45S, 46S, 47S, 48S, 49S, 50S, 51S, 52S, 53S, 54S, 55S, 56S, 57S, 58S, 59S, 60S, 61S, 62S, 63S, 64S, or 65S and the antisense strand comprises pattern 17AS. In some embodiments, the sense strand comprises pattern 1S, 2S, 3S, 4S, 5S, 6S, 7S, 8S, 9S, 10S, 11S, 12S, 13S, 14S, 15S, 16S, 17S, 18S, 19S, 20S, 21S, 22S, 23S, 24S, 25S, 26S, 27S, 28S, 29S, 30S, 31S, 32S, 33S, 33S, 34S, 35S, 36S, 37S, 38S, 39S, 40S, 41S, 42S, 43S, 44S, 44S, 45S, 46S, 47S, 48S, 49S, 50S, 51S, 52S, 53S, 54S, 55S, 56S, 57S, 58S, 59S, 60S, 61S, 62S, 63S, 64S, or 65S and the antisense strand comprises pattern 18AS. In some embodiments, the sense strand comprises pattern 1S, 2S, 3S, 4S, 5S, 6S, 7S, 8S, 9S, 10S, 11S, 12S, 13S, 14S, 15S, 16S, 17S, 18S, 19S, 20S, 21S, 22S, 23S, 24S, 25S, 26S, 27S, 28S, 29S, 30S, 31S, 32S, 33S, 33S, 34S, 35S, 36S, 37S, 38S, 39S, 40S, 41S, 42S, 43S, 44S, 44S, 45S, 46S, 47S, 48S, 49S, 50S, 51S, 52S, 53S, 54S, 55S, 56S, 57S, 58S, 59S, 60S, 61S, 62S, 63S, 64S, or 65S and the antisense strand comprises pattern 19AS. In some embodiments, the sense strand comprises pattern 1S, 2S, 3S, 4S, 5S, 6S, 7S, 8S, 9S, 10S, 11S, 12S, 13S, 14S, 15S, 16S, 17S, 18S, 19S, 20S, 21S, 22S, 23S, 24S, 25S, 26S, 27S, 28S, 29S, 30S, 31S, 32S, 33S, 33S, 34S, 35S, 36S, 37S, 38S, 39S, 40S, 41S, 42S, 43S, 44S, 44S, 45S, 46S, 47S, 48S, 49S, 50S, 51S, 52S, 53S, 54S, 55S, 56S, 57S, 58S, 59S, 60S, 61S, 62S, 63S, 64S, or 65S and the antisense strand comprises pattern 20AS. In some embodiments, the sense strand comprises pattern 1S, 2S, 3S, 4S, 5S, 6S, 7S, 8S, 9S, 10S, 11S, 12S, 13S, 14S, 15S, 16S, 17S, 18S, 19S, 20S, 21S, 22S, 23S, 24S, 25S, 26S, 27S, 28S, 29S, 30S, 31S, 32S, 33S, 33S, 34S, 35S, 36S, 37S, 38S, 39S, 40S, 41S, 42S, 43S, 44S, 44S, 45S, 46S, 47S, 48S, 49S, 50S, 51S, 52S, 53S, 54S, 55S, 56S, 57S, 58S, 59S, 60S, 61S, 62S, 63S, 64S, or 65S and the antisense strand comprises pattern 21AS. In some embodiments, the sense strand comprises pattern 1S, 2S, 3S, 4S, 5S, 6S, 7S, 8S, 9S, 10S, 11S, 12S, 13S, 14S, 15S, 16S, 17S, 18S, 19S, 20S, 21S, 22S, 23S, 24S, 25S, 26S, 27S, 28S, 29S, 30S, 31S, 32S, 33S, 33S, 34S, 35S, 36S, 37S, 38S, 39S, 40S, 41S, 42S, 43S, 44S, 44S, 45S, 46S, 47S, 48S, 49S, 50S, 51S, 52S, 53S, 54S, 55S, 56S, 57S, 58S, 59S, 60S, 61S, 62S, 63S, 64S, or 65S and the antisense strand comprises pattern 22AS. In some embodiments, the sense strand comprises pattern 1S, 2S, 3S, 4S, 5S, 6S, 7S, 8S, 9S, 10S, 11S, 12S, 13S, 14S, 15S, 16S, 17S, 18S, 19S, 20S, 21S, 22S, 23S, 24S, 25S, 26S, 27S, 28S, 29S, 30S, 31S, 32S, 33S, 33S, 34S, 35S, 36S, 37S, 38S, 39S, 40S, 41S, 42S, 43S, 44S, 44S, 45S, 46S, 47S, 48S, 49S, 50S, 51S, 52S, 53S, 54S, 55S, 56S, 57S, 58S, 59S, 60S, 61S, 62S, 63S, 64S, or 65S and the antisense strand comprises pattern 23AS. In some embodiments, the sense strand comprises pattern 1S, 2S, 3S, 4S, 5S, 6S, 7S, 8S, 9S, 10S, 11S, 12S, 13S, 14S, 15S, 16S, 17S, 18S, 19S, 20S, 21S, 22S, 23S, 24S, 25S, 26S, 27S, 28S, 29S, 30S, 31S, 32S, 33S, 33S, 34S, 35S, 36S, 37S, 38S, 39S, 40S, 41S, 42S, 43S, 44S, 44S, 45S, 46S, 47S, 48S, 49S, 50S, 51S, 52S, 53S, 54S, 55S, 56S, 57S, 58S, 59S, 60S, 61S, 62S, 63S, 64S, or 65S and the antisense strand comprises pattern 24AS. In some embodiments, the sense strand comprises pattern 1S, 2S, 3S, 4S, 5S, 6S, 7S, 8S, 9S, 10S, 11S, 12S, 13S, 14S, 15S, 16S, 17S, 18S, 19S, 20S, 21S, 22S, 23S, 24S, 25S, 26S, 27S, 28S, 29S, 30S, 31S, 32S, 33S, 33S, 34S, 35S, 36S, 37S, 38S, 39S, 40S, 41S, 42S, 43S, 44S, 44S, 45S, 46S, 47S, 48S, 49S, 50S, 51S, 52S, 53S, 54S, 55S, 56S, 57S, 58S, 59S, 60S, 61S, 62S, 63S, 64S, or 65S and the antisense strand comprises pattern 25AS. In some embodiments, the sense strand comprises pattern 1S, 2S, 3S, 4S, 5S, 6S, 7S, 8S, 9S, 10S, 11S, 12S, 13S, 14S, 15S, 16S, 17S, 18S, 19S, 20S, 21S, 22S, 23S, 24S, 25S, 26S, 27S, 28S, 29S, 30S, 31S, 32S, 33S, 33S, 34S, 35S, 36S, 37S, 38S, 39S, 40S, 41S, 42S, 43S, 44S, 44S, 45S, 46S, 47S, 48S, 49S, 50S, 51S, 52S, 53S, 54S, 55S, 56S, 57S, 58S, 59S, 60S, 61S, 62S, 63S, 64S, or 65S and the antisense strand comprises pattern 26AS. In some embodiments, the sense strand comprises pattern 1S, 2S, 3S, 4S, 5S, 6S, 7S, 8S, 9S, 10S, 11S, 12S, 13S, 14S, 15S, 16S, 17S, 18S, 19S, 20S, 21S, 22S, 23S, 24S, 25S, 26S, 27S, 28S, 29S, 30S, 31S, 32S, 33S, 33S, 34S, 35S, 36S, 37S, 38S, 39S, 40S, 41S, 42S, 43S, 44S, 44S, 45S, 46S, 47S, 48S, 49S, 50S, 51S, 52S, 53S, 54S, 55S, 56S, 57S, 58S, 59S, 60S, 61S, 62S, 63S, 64S, or 65S and the antisense strand comprises pattern 27AS. In some embodiments, the sense strand comprises pattern 1S, 2S, 3S, 4S, 5S, 6S, 7S, 8S, 9S, 10S, 11S, 12S, 13S, 14S, 15S, 16S, 17S, 18S, 19S, 20S, 21S, 22S, 23S, 24S, 25S, 26S, 27S, 28S, 29S, 30S, 31S, 32S, 33S, 33S, 34S, 35S, 36S, 37S, 38S, 39S, 40S, 41S, 42S, 43S, 44S, 44S, 45S, 46S, 47S, 48S, 49S, 50S, 51S, 52S, 53S, 54S, 55S, 56S, 57S, 58S, 59S, 60S, 61S, 62S, 63S, 64S, or 65S and the antisense strand comprises pattern 28AS. In some embodiments, the sense strand comprises pattern 1S, 2S, 3S, 4S, 5S, 6S, 7S, 8S, 9S, 10S, 11S, 12S, 13S, 14S, 15S, 16S, 17S, 18S, 19S, 20S, 21S, 22S, 23S, 24S, 25S, 26S, 27S, 28S, 29S, 30S, 31S, 32S, 33S, 33S, 34S, 35S, 36S, 37S, 38S, 39S, 40S, 41S, 42S, 43S, 44S, 44S, 45S, 46S, 47S, 48S, 49S, 50S, 51S, 52S, 53S, 54S, 55S, 56S, 57S, 58S, 59S, 60S, 61S, 62S, 63S, 64S, or 65S and the antisense strand comprises pattern 29AS. In some embodiments, the sense strand comprises pattern 1S, 2S, 3S, 4S, 5S, 6S, 7S, 8S, 9S, 10S, 11S, 12S, 13S, 14S, 15S, 16S, 17S, 18S, 19S, 20S, 21S, 22S, 23S, 24S, 25S, 26S, 27S, 28S, 29S, 30S, 31S, 32S, 33S, 33S, 34S, 35S, 36S, 37S, 38S, 39S, 40S, 41S, 42S, 43S, 44S, 44S, 45S, 46S, 47S, 48S, 49S, 50S, 51S, 52S, 53S, 54S, 55S, 56S, 57S, 58S, 59S, 60S, 61S, 62S, 63S, 64S, or 65S and the antisense strand comprises pattern 30AS. In some embodiments, the sense strand comprises pattern 1S, 2S, 3S, 4S, 5S, 6S, 7S, 8S, 9S, 10S, 11S, 12S, 13S, 14S, 15S, 16S, 17S, 18S, 19S, 20S, 21S, 22S, 23S, 24S, 25S, 26S, 27S, 28S, 29S, 30S, 31S, 32S, 33S, 33S, 34S, 35S, 36S, 37S, 38S, 39S, 40S, 41S, 42S, 43S, 44S, 44S, 45S, 46S, 47S, 48S, 49S, 50S, 51S, 52S, 53S, 54S, 55S, 56S, 57S, 58S, 59S, 60S, 61S, 62S, 63S, 64S, or 65S and the antisense strand comprises pattern 31AS. In some embodiments, the sense strand comprises pattern 1S, 2S, 3S, 4S, 5S, 6S, 7S, 8S, 9S, 10S, 11S, 12S, 13S, 14S, 15S, 16S, 17S, 18S, 19S, 20S, 21S, 22S, 23S, 24S, 25S, 26S, 27S, 28S, 29S, 30S, 31S, 32S, 33S, 33S, 34S, 35S, 36S, 37S, 38S, 39S, 40S, 41S, 42S, 43S, 44S, 44S, 45S, 46S, 47S, 48S, 49S, 50S, 51S, 52S, 53S, 54S, 55S, 56S, 57S, 58S, 59S, 60S, 61S, 62S, 63S, 64S, or 65S and the antisense strand comprises pattern 32AS. In some embodiments, the sense strand comprises pattern 1S, 2S, 3S, 4S, 5S, 6S, 7S, 8S, 9S, 10S, 11S, 12S, 13S, 14S, 15S, 16S, 17S, 18S, 19S, 20S, 21S, 22S, 23S, 24S, 25S, 26S, 27S, 28S, 29S, 30S, 31S, 32S, 33S, 33S, 34S, 35S, 36S, 37S, 38S, 39S, 40S, 41S, 42S, 43S, 44S, 44S, 45S, 46S, 47S, 48S, 49S, 50S, 51S, 52S, 53S, 54S, 55S, 56S, 57S, 58S, 59S, 60S, 61S, 62S, 63S, 64S, or 65S and the antisense strand comprises pattern 33AS. In some embodiments, the sense strand comprises pattern 1S, 2S, 3S, 4S, 5S, 6S, 7S, 8S, 9S, 10S, 11S, 12S, 13S, 14S, 15S, 16S, 17S, 18S, 19S, 20S, 21S, 22S, 23S, 24S, 25S, 26S, 27S, 28S, 29S, 30S, 31S, 32S, 33S, 33S, 34S, 35S, 36S, 37S, 38S, 39S, 40S, 41S, 42S, 43S, 44S, 44S, 45S, 46S, 47S, 48S, 49S, 50S, 51S, 52S, 53S, 54S, 55S, 56S, 57S, 58S, 59S, 60S, 61S, 62S, 63S, 64S, or 65S and the antisense strand comprises pattern 34AS. In some embodiments, the sense strand comprises pattern 1S, 2S, 3S, 4S, 5S, 6S, 7S, 8S, 9S, 10S, 11S, 12S, 13S, 14S, 15S, 16S, 17S, 18S, 19S, 20S, 21S, 22S, 23S, 24S, 25S, 26S, 27S, 28S, 29S, 30S, 31S, 32S, 33S, 33S, 34S, 35S, 36S, 37S, 38S, 39S, 40S, 41S, 42S, 43S, 44S, 44S, 45S, 46S, 47S, 48S, 49S, 50S, 51S, 52S, 53S, 54S, 55S, 56S, 57S, 58S, 59S, 60S, 61S, 62S, 63S, 64S, or 65S and the antisense strand comprises pattern 35AS. In some embodiments, the sense strand comprises pattern 1S, 2S, 3S, 4S, 5S, 6S, 7S, 8S, 9S, 10S, 11S, 12S, 13S, 14S, 15S, 16S, 17S, 18S, 19S, 20S, 21S, 22S, 23S, 24S, 25S, 26S, 27S, 28S, 29S, 30S, 31S, 32S, 33S, 33S, 34S, 35S, 36S, 37S, 38S, 39S, 40S, 41S, 42S, 43S, 44S, 44S, 45S, 46S, 47S, 48S, 49S, 50S, 51S, 52S, 53S, 54S, 55S, 56S, 57S, 58S, 59S, 60S, 61S, 62S, 63S, 64S, or 65S and the antisense strand comprises pattern 36AS. In some embodiments, the sense strand comprises pattern 1S, 2S, 3S, 4S, 5S, 6S, 7S, 8S, 9S, 10S, 11S, 12S, 13S, 14S, 15S, 16S, 17S, 18S, 19S, 20S, 21S, 22S, 23S, 24S, 25S, 26S, 27S, 28S, 29S, 30S, 31S, 32S, 33S, 33S, 34S, 35S, 36S, 37S, 38S, 39S, 40S, 41S, 42S, 43S, 44S, 44S, 45S, 46S, 47S, 48S, 49S, 50S, 51S, 52S, 53S, 54S, 55S, 56S, 57S, 58S, 59S, 60S, 61S, 62S, 63S, 64S, or 65S and the antisense strand comprises pattern 37AS. In some embodiments, the sense strand comprises pattern 1S, 2S, 3S, 4S, 5S, 6S, 7S, 8S, 9S, 10S, 11S, 12S, 13S, 14S, 15S, 16S, 17S, 18S, 19S, 20S, 21S, 22S, 23S, 24S, 25S, 26S, 27S, 28S, 29S, 30S, 31S, 32S, 33S, 33S, 34S, 35S, 36S, 37S, 38S, 39S, 40S, 41S, 42S, 43S, 44S, 44S, 45S, 46S, 47S, 48S, 49S, 50S, 51S, 52S, 53S, 54S, 55S, 56S, 57S, 58S, 59S, 60S, 61S, 62S, 63S, 64S, or 65S and the antisense strand comprises pattern 38AS. In some embodiments, the sense strand comprises pattern 1S, 2S, 3S, 4S, 5S, 6S, 7S, 8S, 9S, 10S, 11S, 12S, 13S, 14S, 15S, 16S, 17S, 18S, 19S, 20S, 21S, 22S, 23S, 24S, 25S, 26S, 27S, 28S, 29S, 30S, 31S, 32S, 33S, 33S, 34S, 35S, 36S, 37S, 38S, 39S, 40S, 41S, 42S, 43S, 44S, 44S, 45S, 46S, 47S, 48S, 49S, 50S, 51S, 52S, 53S, 54S, 55S, 56S, 57S, 58S, 59S, 60S, 61S, 62S, 63S, 64S, or 65S and the antisense strand comprises pattern 39AS. In some embodiments, the sense strand comprises pattern 1S, 2S, 3S, 4S, 5S, 6S, 7S, 8S, 9S, 10S, 11S, 12S, 13S, 14S, 15S, 16S, 17S, 18S, 19S, 20S, 21S, 22S, 23S, 24S, 25S, 26S, 27S, 28S, 29S, 30S, 31S, 32S, 33S, 33S, 34S, 35S, 36S, 37S, 38S, 39S, 40S, 41S, 42S, 43S, 44S, 44S, 45S, 46S, 47S, 48S, 49S, 50S, 51S, 52S, 53S, 54S, 55S, 56S, 57S, 58S, 59S, 60S, 61S, 62S, 63S, 64S, or 65S and the antisense strand comprises pattern 40AS.

[0200] In some embodiments, the sense strand comprises any one of modification patters 1S, 2S, 3S, 4S, 5S, 6S, 7S, 8S, or 9S. In some embodiments, the sense strand comprises any one of modification patters 1S, 2S, 3S, 4S, 5S, 6S, 7S, 8S, 9S, 10S, 11S, 12S, 13S, 14S, 15S, 16S, 17S, 18S, 19S, 20S, 21S, 22S, 23S, 24S, 25S, 26S, 27S, 28S, 29S, 30S, 31S, 32S, 33S, 33S, 34S, 35S, 36S, 37S, 38S, 39S, 40S, 41S, 42S, 43S, 44S, 44S, 45S, 46S, 47S, 48S, 49S, 50S, 51S, 52S, 53S, 54S, 55S, 56S, 57S, 58S, 59S, 60S, 61S, 62S, 63S, 64S, or 65S. In some embodiments, the sense strand comprises modification pattern 1AS, 2AS, 3AS, 4AS, 5AS, 6AS, 7AS, or 8AS. In some embodiments, the antisense strand comprises modification pattern 1AS, 2AS, 3AS, 4AS, 5AS, 6AS, 7AS, 8AS, 9AS, 10AS, 11AS, 12AS, 13AS, 14AS, 15AS, 16AS, 17AS, 18AS, 19AS, 20AS, 21AS, 22AS, 23AS, 24AS, 25AS, 26AS, 27AS, 28AS, 29AS, 30AS, 31AS, 32AS, 34AS, 35AS, 36AS, 37AS, 38AS, 39AS, or 40AS. In some embodiments, the antisense strand comprises modification pattern 1AS, 2AS, 3AS, 4AS, 5AS, 6AS, 7AS, or 8AS. In some embodiments, the antisense strand comprises modification pattern 1S, 2S, 3S, 4S, 5S, 6S, 7S, 8S, 9S, 10S, 11S, 12S, 13S, 14S, 15S, 16S, 17S, 18S, 19S, 20S, 21S, 22S, 23S, 24S, 25S, 26S, 27S, 28S, 29S, 30S, 31S, 32S, 33S, 33S, 34S, 35S, 36S, 37S, 38S, 39S, 40S, 41S, 42S, 43S, 44S, 44S, 45S, 46S, 47S, 48S, 49S, 50S, 51S, 52S, 53S, 54S, 55S, 56S, 57S, 58S, 59S, 60S, 61S, 62S, 63S, 64S, or 65S. In some embodiments, the sense strand or the antisense strand comprises modification pattern ASO1.

[0201] In some embodiments, purines of the sense strand comprise 2′-fluoro modified purines. In some embodiments, purines of the sense strand comprise 2′-O-methyl modified purines. In some embodiments, purines of the sense strand comprise a mixture of 2′-fluoro and 2′-O-methyl modified purines. In some embodiments, all purines of the sense strand comprise 2′-fluoro modified purines. In some embodiments, all purines of the sense strand comprise 2′-O-methyl modified purines. In some embodiments, all purines of the sense strand comprise a mixture of 2′-fluoro and 2′-O-methyl modified purines.

[0202] In some embodiments, pyrimidines of the sense strand comprise 2′-fluoro modified pyrimidines. In some embodiments, pyrimidines of the sense strand comprise 2′-O-methyl modified pyrimidines. In some embodiments, pyrimidines of the sense strand comprise a mixture of 2′-fluoro and 2′-O-methyl modified pyrimidines. In some embodiments, all pyrimidines of the sense strand comprise 2′-fluoro modified pyrimidines. In some embodiments, all pyrimidines of the sense strand comprise 2′-O-methyl modified pyrimidines. In some embodiments, all pyrimidines of the sense strand comprise a mixture of 2′-fluoro and 2′-O-methyl modified pyrimidines.

[0203] In some embodiments, purines of the sense strand comprise 2′-fluoro modified purines, and pyrimidines of the sense strand comprise a mixture of 2′-fluoro and 2′-O-methyl modified pyrimidines. In some embodiments, purines of the sense strand comprise 2′-O-methyl modified purines, and pyrimidines of the sense strand comprise a mixture of 2′-fluoro and 2′-O-methyl modified pyrimidines. In some embodiments, purines of the sense strand comprise 2′-fluoro modified purines, and pyrimidines of the sense strand comprise 2′-O-methyl modified pyrimidines. In some embodiments, purines of the sense strand comprise 2′-O-methyl modified purines, and pyrimidines of the sense strand comprise 2′-fluoro modified pyrimidines. In some embodiments, pyrimidines of the sense strand comprise 2′-fluoro modified pyrimidines, and purines of the sense strand comprise a mixture of 2′-fluoro and 2′-O-methyl modified purines. In some embodiments, pyrimidines of the sense strand comprise 2′-O-methyl modified pyrimidines, and purines of the sense strand comprise a mixture of 2′-fluoro and 2′-O-methyl modified purines. In some embodiments, pyrimidines of the sense strand comprise 2′-fluoro modified pyrimidines, and purines of the sense strand comprise 2′-O-methyl modified purines. In some embodiments, pyrimidines of the sense strand comprise 2′-O-methyl modified pyrimidines, and purines of the sense strand comprise 2′-fluoro modified purines.

[0204] In some embodiments, all purines of the sense strand comprise 2′-fluoro modified purines, and all pyrimidines of the sense strand comprise a mixture of 2′-fluoro and 2′-O-methyl modified pyrimidines. In some embodiments, all purines of the sense strand comprise 2′-O-methyl modified purines, and all pyrimidines of the sense strand comprise a mixture of 2′-fluoro and 2′-O-methyl modified pyrimidines. In some embodiments, all purines of the sense strand comprise 2′-fluoro modified purines, and all pyrimidines of the sense strand comprise 2′-O-methyl modified pyrimidines. In some embodiments, all purines of the sense strand comprise 2′-O-methyl modified purines, and all pyrimidines of the sense strand comprise 2′-fluoro modified pyrimidines. In some embodiments, all pyrimidines of the sense strand comprise 2′-fluoro modified pyrimidines, and all purines of the sense strand comprise a mixture of 2′-fluoro and 2′-O-methyl modified purines. In some embodiments, all pyrimidines of the sense strand comprise 2′-O-methyl modified pyrimidines, and all purines of the sense strand comprise a mixture of 2′-fluoro and 2′-O-methyl modified purines. In some embodiments, all pyrimidines of the sense strand comprise 2′-fluoro modified pyrimidines, and all purines of the sense strand comprise 2′-O-methyl modified purines. In some embodiments, all pyrimidines of the sense strand comprise 2′-O-methyl modified pyrimidines, and all purines of the sense strand comprise 2′-fluoro modified purines.

[0205] In some embodiments, purines of the antisense strand comprise 2′-fluoro modified purines. In some embodiments, purines of the antisense strand comprise 2′-O-methyl modified purines. In some embodiments, purines of the antisense strand comprise a mixture of 2′-fluoro and 2′-O-methyl modified purines. In some embodiments, all purines of the antisense strand comprise 2′-fluoro modified purines. In some embodiments, all purines of the antisense strand comprise 2′-O-methyl modified purines. In some embodiments, all purines of the antisense strand comprise a mixture of 2′-fluoro and 2′-O-methyl modified purines.

[0206] In some embodiments, pyrimidines of the antisense strand comprise 2′-fluoro modified pyrimidines. In some embodiments, pyrimidines of the antisense strand comprise 2′-O-methyl modified pyrimidines. In some embodiments, pyrimidines of the antisense strand comprise a mixture of 2′-fluoro and 2′-O-methyl modified pyrimidines. In some embodiments, all pyrimidines of the antisense strand comprise 2′-fluoro modified pyrimidines. In some embodiments, all pyrimidines of the antisense strand comprise 2′-O-methyl modified pyrimidines. In some embodiments, all pyrimidines of the antisense strand comprise a mixture of 2′-fluoro and 2′-O-methyl modified pyrimidines.

[0207] In some embodiments, purines of the antisense strand comprise 2′-fluoro modified purines, and pyrimidines of the antisense strand comprise a mixture of 2′-fluoro and 2′-O-methyl modified pyrimidines. In some embodiments, purines of the antisense strand comprise 2′-O-methyl modified purines, and pyrimidines of the antisense strand comprise a mixture of 2′-fluoro and 2′-O-methyl modified pyrimidines. In some embodiments, purines of the antisense strand comprise 2′-fluoro modified purines, and pyrimidines of the antisense strand comprise 2′-O-methyl modified pyrimidines. In some embodiments, purines of the antisense strand comprise 2′-O-methyl modified purines, and pyrimidines of the antisense strand comprise 2′-fluoro modified pyrimidines. In some embodiments, pyrimidines of the antisense strand comprise 2′-fluoro modified pyrimidines, and purines of the antisense strand comprise a mixture of 2′-fluoro and 2′-O-methyl modified purines. In some embodiments, pyrimidines of the antisense strand comprise 2′-O-methyl modified pyrimidines, and purines of the antisense strand comprise a mixture of 2′-fluoro and 2′-O-methyl modified purines. In some embodiments, pyrimidines of the antisense strand comprise 2′-fluoro modified pyrimidines, and purines of the antisense strand comprise 2′-O-methyl modified purines. In some embodiments, pyrimidines of the antisense strand comprise 2′-O-methyl modified pyrimidines, and purines of the antisense strand comprise 2′-fluoro modified purines.

[0208] In some embodiments, all purines of the antisense strand comprise 2′-fluoro modified purines, and all pyrimidines of the antisense strand comprise a mixture of 2′-fluoro and 2′-O-methyl modified pyrimidines. In some embodiments, all purines of the antisense strand comprise 2′-O-methyl modified purines, and all pyrimidines of the antisense strand comprise a mixture of 2′-fluoro and 2′-O-methyl modified pyrimidines. In some embodiments, all purines of the antisense strand comprise 2′-fluoro modified purines, and all pyrimidines of the antisense strand comprise 2′-O-methyl modified pyrimidines. In some embodiments, all purines of the antisense strand comprise 2′-O-methyl modified purines, and all pyrimidines of the antisense strand comprise 2′-fluoro modified pyrimidines. In some embodiments, all pyrimidines of the antisense strand comprise 2′-fluoro modified pyrimidines, and all purines of the antisense strand comprise a mixture of 2′-fluoro and 2′-O-methyl modified purines. In some embodiments, all pyrimidines of the antisense strand comprise 2′-O-methyl modified pyrimidines, and all purines of the antisense strand comprise a mixture of 2′-fluoro and 2′-O-methyl modified purines. In some embodiments, all pyrimidines of the antisense strand comprise 2′-fluoro modified pyrimidines, and all purines of the antisense strand comprise 2′-O-methyl modified purines. In some embodiments, all pyrimidines of the antisense strand comprise 2′-O-methyl modified pyrimidines, and all purines of the antisense strand comprise 2′-fluoro modified purines.

[0209] Disclosed herein, in some embodiments, are modified oligonucleotides. The modified oligonucleotide may be an siRNA that includes modifications to the ribose rings, and phosphate linkages. The modifications may be in particular patterns that maximize cell delivery, stability, and efficiency. The siRNA may also include a vinyl phosphonate and a hydrophobic group. These modifications may aid in delivery to a cell or tissue within a subject. The modified oligonucleotide may be used in a method such as a treatment method or a method of reducing gene expression.

[0210] In some embodiments, the oligonucleotide comprises a duplex consisting of 21 nucleotide single strands with base pairing between 19 of the base pairs. In some embodiments, the duplex comprises single-stranded 2 nucleotide overhangs are at the 3′ ends of each strand. One strand (antisense strand) is complementary to a MTRES1 mRNA. Each end of the antisense strand has one to two phosphorothioate bonds. The 5′ end has an optional phosphate mimic such as a vinyl phosphonate. In some embodiments, the oligonucleotide is used to knock down a MTRES1 mRNA or a target protein. In some embodiments, the sense strand has the same sequence as the MTRES1 mRNA. In some embodiments, there are 1-2 phosphorothioates at the 3′ end. In some embodiments, there are 1 or no phosphorothioates at the 5′ end. In some embodiments, there is a hydrophobic conjugate of 12 to 25 carbons attached at the 5′ end via a phosphodiester bond.

[0211] In some cases, the sense strand of any of the siRNAs comprises siRNA with a particular modification pattern. In some embodiments of the modification pattern, position 9 counting from the 5′ end of the sense strand may have a 2′F modification. In some embodiments, when position 9 of the sense strand is a pyrimidine, then all purines in the sense strand have a 2′OMe modification. In some embodiments, when position 9 is the only pyrimidine between positions 5 and 11 of the sense stand, then position 9 is the only position with a 2′F modification in the sense strand. In some embodiments, when position 9 and only one other base between positions 5 and 11 of the sense strand are pyrimidines, then both of these pyrimidines are the only two positions with a 2′F modification in the sense strand. In some embodiments, when position 9 and only two other bases between positions 5 and 11 of the sense strand are pyrimidines, and those two other pyrimidines are in adjacent positions so that there would be not three 2′F modifications in a row, then any combination of 2′F modifications can be made that give three 2′F modifications in total. In some embodiments, when there are more than 2 pyrimidines between positions 5 and 11 of the sense strand, then all combinations of pyrimidines having the 2′F modification are allowed that have three to five 2′F modifications in total, provided that the sense strand does not have three 2′F modifications in a row. In some cases, the sense strand of any of the siRNAs comprises a modification pattern which conforms to any or all of these sense strand rules.

[0212] In some embodiments, when position 9 of the sense strand is a purine, then all purines in the sense strand have a 2′OMe modification. In some embodiments, when position 9 is the only purine between positions 5 and 11 of the sense stand, then position 9 is the only position with a 2′F modification in the sense strand. In some embodiments, when position 9 and only one other base between positions 5 and 11 of the sense strand are purines, then both of these purines are the only two positions with a 2′F modification in the sense strand. In some embodiments, when position 9 and only two other bases between positions 5 and 11 of the sense strand are purines, and those two other purines are in adjacent positions so that there would be not three 2′F modifications in a row, then any combination of 2′F modifications can be made that give three 2′F modifications in total. In some embodiments, when there are more than 2 purines between positions 5 and 11 of the sense strand, then all combinations of purines having the 2′F modification are allowed that have three to five 2′F modifications in total, provided that the sense strand does not have three 2′F modifications in a row. In some cases, the sense strand of any of the siRNAs comprises a modification pattern which conforms to any or all of these sense strand rules.

[0213] In some cases, position 9 of the sense strand can be a 2′deoxy. In these cases, 2′F and 2′OMe modifications may occur at the other positions of the sense strand. In some cases, the sense strand of any of the siRNAs comprises a modification pattern which conforms to these sense strand rules.

[0214] In some cases, the sense strand of any of the siRNAs comprises a modification pattern which conforms to these sense strand rules.

[0215] Terminal modifications useful for modulating activity include modification of the 5′ end of the antisense strand with phosphate or phosphate analogs. In certain embodiments, the 5′ end of the antisense strand is phosphorylated or includes a phosphoryl analog. Exemplary 5′-phosphate modifications include those which are compatible with RNA-induced silencing complex (RISC) mediated gene silencing. In some embodiments, the 3′ end of the antisense strand is phosphorylated or includes a phosphoryl analog. In some embodiments, the 5′ end of the sense strand is phosphorylated or includes a phosphoryl analog. In some embodiments, the 3′ end of the sense strand is phosphorylated or includes a phosphoryl analog.

[0216] In some embodiments, the oligonucleotide comprises a phosphate or phosphate mimic at the 5′ end of the antisense strand. In some embodiment, the phosphate mimic includes a 5′-vinyl phosphonate (VP). In some embodiment, the phosphate mimic is a 5′-VP. In some embodiments, the oligonucleotide comprises a phosphate or phosphate mimic at the 3′ end of the antisense strand. In some embodiments, the oligonucleotide comprises a phosphate or phosphate mimic at the 5′ end of the sense strand. In some embodiments, the oligonucleotide comprises a phosphate or phosphate mimic at the 3′ end of the sense strand.

[0217] Disclosed herein, in some embodiments are compositions comprising an oligonucleotide that targets MTRES1 and when administered to a cell decreases expression of MTRES1, wherein the oligonucleotide comprises a small interfering RNA (siRNA) comprising a sense strand and an antisense strand, wherein the sense strand comprises a sense strand sequence described herein in which at least one internucleoside linkage is modified and at least one nucleoside is modified, or an sense strand sequence comprising 1 or 2 nucleoside substitutions, additions, or deletions of the oligonucleotide sequence in which at least one internucleoside linkage is modified and at least one nucleoside is modified, and wherein the antisense strand comprises an antisense strand sequence described herein in which at least one internucleoside linkage is modified and at least one nucleoside is modified, or an oligonucleotide sequence comprising 1 or 2 nucleoside substitutions, additions, or deletions of the antisense strand sequence in which at least one internucleoside linkage is modified and at least one nucleoside is modified. Some embodiments relate to methods that include administering the composition to a subject.

[0218] In some embodiments, the siRNA comprises a sense strand, an antisense strand, and a lipid moiety connected to an end of the sense or antisense strand; wherein the lipid moiety comprises a phenyl or cyclohexanyl linker, wherein the linker is connected to a lipid and to the end of the sense or antisense strand. In some embodiments, any one of the following is true with regard to the sense strand: (a) all purines comprise fluoro modified purines and all pyrimidines comprise (i) a mixture of 2′-O-methyl and 2′-O-methoxyethyl modified pyrimidines; or (ii) a mixture of 2′-fluoro, 2′-O-methyl, and 2′-O-methoxyethyl modified pyrimidines; (b) all purines comprise 2′-O-methyl modified purines and all pyrimidines comprise (vi) all pyrimidines of the sense strand comprise a mixture of 2′-fluoro and 2′-O-methoxyethyl modified pyrimidines; or (ii) a mixture of 2′-fluoro, 2′-O-methyl, and 2′-O-methoxyethyl modified pyrimidines; (c) all purines comprise 2′-O-methoxyethyl modified purines and all pyrimidines comprise (i) a mixture of 2′-fluoro and 2′-O-methyl modified pyrimidines; or (ii) a mixture of 2′-fluoro, 2′-O-methyl, and 2′-O-methoxyethyl modified pyrimidines; (d) all purines comprise a mixture of 2′-fluoro and 2′-O-methyl modified purines and all pyrimidines comprise (i) 2′-O-methoxyethyl modified pyrimidines; (ii) a mixture of 2′-O-methyl and 2′-O-methoxyethyl modified pyrimidines; (iii) a mixture of 2′-fluoro and 2′-O-methoxyethyl modified pyrimidines; or (iv) a mixture of 2′-fluoro, 2′-O-methyl, and 2′-O-methoxyethyl modified pyrimidines; (e) all purines comprise a mixture of 2′-fluoro and 2′-O-methoxyethyl modified purines and all pyrimidines of the sense strand comprise (i) 2′-O-methyl modified pyrimidines; (ii) a mixture of 2′-fluoro and 2′-O-methyl modified pyrimidines; (iii) a mixture of 2′-O-methyl and 2′-O-methoxyethyl modified pyrimidines; or (iv) a mixture of 2′-fluoro, 2′-O-methyl, and 2′-O-methoxyethyl modified pyrimidines; (f) all purines comprise a mixture of 2′-O-methyl and 2′-O-methoxyethyl modified purines and all pyrimidines comprise (i) 2′-fluoro modified pyrimidines; (ii) a mixture of 2′-fluoro and 2′-O-methyl modified pyrimidines; (iii) a mixture of 2′-fluoro and 2′-O-methoxyethyl modified pyrimidines; or (iv) a mixture of 2′-fluoro, 2′-O-methyl, and 2′-O-methoxyethyl modified pyrimidines; or (g) all purines comprise a mixture of 2′-fluoro, 2′-O-methyl, and 2′-O-methoxyethyl modified purines and all pyrimidines comprise (i) 2′-fluoro modified pyrimidines; (ii) 2′-O-methyl modified pyrimidines; (iii) 2′-O-methoxyethyl modified pyrimidines; (iv) a mixture of 2′-fluoro and 2′-O-methyl modified pyrimidines; (v) a mixture of 2′-O-methyl and 2′-O-methoxyethyl modified pyrimidines; (vi) a mixture of 2′-fluoro and 2′-O-methoxyethyl modified pyrimidines; or (vii) a mixture of 2′-fluoro, 2′-O-methyl, and 2′-O-methoxyethyl modified pyrimidines. In some embodiments, any one of the following is true with regard to the antisense strand: all purines comprise 2′-fluoro modified purines, and all pyrimidines comprise a mixture of 2′-fluoro and 2′-O-methyl modified pyrimidines; all purines comprise 2′-O-methyl modified purines, and all pyrimidines comprise a mixture of 2′-fluoro and 2′-O-methyl modified pyrimidines; all purines comprise 2′-O-methyl modified purines, and all pyrimidines comprise 2′-fluoro modified pyrimidines; all pyrimidines comprise 2′-fluoro modified pyrimidines, and all purines comprise a mixture of 2′-fluoro and 2′-O-methyl modified purines; all pyrimidines comprise 2′-O-methyl modified pyrimidines, and all purines comprise a mixture of 2′-fluoro and 2′-O-methyl modified purines; or all pyrimidines comprise 2′-O-methyl modified pyrimidines, and all purines comprise 2′-fluoro modified purines. In some embodiments, the siRNA comprises comprising a sense strand and an antisense strand; wherein the antisense strand comprises a 5′ end comprising a vinyl phosphonate and 2 phosphorothioate linkages, and a 3′ end comprising 2 phosphorothioate linkages; wherein the sense strand comprises (a) all purines comprise fluoro modified purines and all pyrimidines comprise (i) a mixture of 2′-O-methyl and 2′-O-methoxyethyl modified pyrimidines; or (ii) a mixture of 2′-fluoro, 2′-O-methyl, and 2′-O-methoxyethyl modified pyrimidines; (b) all purines comprise 2′-O-methyl modified purines and all pyrimidines comprise (vi) all pyrimidines of the sense strand comprise a mixture of 2′-fluoro and 2′-O-methoxyethyl modified pyrimidines; or (ii) a mixture of 2′-fluoro, 2′-O-methyl, and 2′-O-methoxyethyl modified pyrimidines; (c) all purines comprise 2′-O-methoxyethyl modified purines and all pyrimidines comprise (i) a mixture of 2′-fluoro and 2′-O-methyl modified pyrimidines; or (ii) a mixture of 2′-fluoro, 2′-O-methyl, and 2′-O-methoxyethyl modified pyrimidines; (d) all purines comprise a mixture of 2′-fluoro and 2′-O-methyl modified purines and all pyrimidines comprise (i) 2′-O-methoxyethyl modified pyrimidines; (ii) a mixture of 2′-O-methyl and 2′-O-methoxyethyl modified pyrimidines; (iii) a mixture of 2′-fluoro and 2′-O-methoxyethyl modified pyrimidines; or (iv) a mixture of 2′-fluoro, 2′-O-methyl, and 2′-O-methoxyethyl modified pyrimidines; (e) all purines comprise a mixture of 2′-fluoro and 2′-O-methoxyethyl modified purines and all pyrimidines of the sense strand comprise (i) 2′-O-methyl modified pyrimidines; (ii) a mixture of 2′-fluoro and 2′-O-methyl modified pyrimidines; (iii) a mixture of 2′-O-methyl and 2′-O-methoxyethyl modified pyrimidines; or (iv) a mixture of 2′-fluoro, 2′-O-methyl, and 2′-O-methoxyethyl modified pyrimidines; (f) all purines comprise a mixture of 2′-O-methyl and 2′-O-methoxyethyl modified purines and all pyrimidines comprise (i) 2′-fluoro modified pyrimidines; (ii) a mixture of 2′-fluoro and 2′-O-methyl modified pyrimidines; (iii) a mixture of 2′-fluoro and 2′-O-methoxyethyl modified pyrimidines; or (iv) a mixture of 2′-fluoro, 2′-O-methyl, and 2′-O-methoxyethyl modified pyrimidines; or (g) all purines comprise a mixture of 2′-fluoro, 2′-O-methyl, and 2′-O-methoxyethyl modified purines and all pyrimidines comprise (i) 2′-fluoro modified pyrimidines; (ii) 2′-O-methyl modified pyrimidines; (iii) 2′-O-methoxyethyl modified pyrimidines; (iv) a mixture of 2′-fluoro and 2′-O-methyl modified pyrimidines; (v) a mixture of 2′-O-methyl and 2′-O-methoxyethyl modified pyrimidines; (vi) a mixture of 2′-fluoro and 2′-O-methoxyethyl modified pyrimidines; or (vii) a mixture of 2′-fluoro, 2′-O-methyl, and 2′-O-methoxyethyl modified pyrimidines; and wherein any one of the following is true with regard to the antisense strand: all purines comprise 2′-fluoro modified purines, and all pyrimidines comprise a mixture of 2′-fluoro and 2′-O-methyl modified pyrimidines, all purines comprise 2′-O-methyl modified purines, and all pyrimidines comprise a mixture of 2′-fluoro and 2′-O-methyl modified pyrimidines, all purines comprise 2′-O-methyl modified purines, and all pyrimidines comprise 2′-fluoro modified pyrimidines, all pyrimidines comprise 2′-fluoro modified pyrimidines, and all purines comprise a mixture of 2′-fluoro and 2′-O-methyl modified purines, all pyrimidines comprise 2′-O-methyl modified pyrimidines, and all purines comprise a mixture of 2′-fluoro and 2′-O-methyl modified purines, or all pyrimidines comprise 2′-O-methyl modified pyrimidines, and all purines comprise 2′-fluoro modified purines.

[0219] In some embodiments, any one of the following is true with regard to the sense strand: (a) all purines comprise fluoro modified purines and all pyrimidines comprise (i) a mixture of 2′-O-methyl and 2′-O-methoxyethyl modified pyrimidines; or (ii) a mixture of 2′-fluoro, 2′-O-methyl, and 2′-O-methoxyethyl modified pyrimidines; (b) all purines comprise 2′-O-methyl modified purines and all pyrimidines comprise (vi) all pyrimidines of the sense strand comprise a mixture of 2′-fluoro and 2′-O-methoxyethyl modified pyrimidines; or (ii) a mixture of 2′-fluoro, 2′-O-methyl, and 2′-O-methoxyethyl modified pyrimidines; (c) all purines comprise 2′-O-methoxyethyl modified purines and all pyrimidines comprise (i) a mixture of 2′-fluoro and 2′-O-methyl modified pyrimidines; or (ii) a mixture of 2′-fluoro, 2′-O-methyl, and 2′-O-methoxyethyl modified pyrimidines; (d) all purines comprise a mixture of 2′-fluoro and 2′-O-methyl modified purines and all pyrimidines comprise (i) 2′-O-methoxyethyl modified pyrimidines; (ii) a mixture of 2′-O-methyl and 2′-O-methoxyethyl modified pyrimidines; (iii) a mixture of 2′-fluoro and 2′-O-methoxyethyl modified pyrimidines; or (iv) a mixture of 2′-fluoro, 2′-O-methyl, and 2′-O-methoxyethyl modified pyrimidines; (e) all purines comprise a mixture of 2′-fluoro and 2′-O-methoxyethyl modified purines and all pyrimidines of the sense strand comprise (i) 2′-O-methyl modified pyrimidines; (ii) a mixture of 2′-fluoro and 2′-O-methyl modified pyrimidines; (iii) a mixture of 2′-O-methyl and 2′-O-methoxyethyl modified pyrimidines; or (iv) a mixture of 2′-fluoro, 2′-O-methyl, and 2′-O-methoxyethyl modified pyrimidines; (f) all purines comprise a mixture of 2′-O-methyl and 2′-O-methoxyethyl modified purines and all pyrimidines comprise (i) 2′-fluoro modified pyrimidines; (ii) a mixture of 2′-fluoro and 2′-O-methyl modified pyrimidines; (iii) a mixture of 2′-fluoro and 2′-O-methoxyethyl modified pyrimidines; or (iv) a mixture of 2′-fluoro, 2′-O-methyl, and 2′-O-methoxyethyl modified pyrimidines; or (g) all purines comprise a mixture of 2′-fluoro, 2′-O-methyl, and 2′-O-methoxyethyl modified purines and all pyrimidines comprise (i) 2′-fluoro modified pyrimidines; (ii) 2′-O-methyl modified pyrimidines; (iii) 2′-O-methoxyethyl modified pyrimidines; (iv) a mixture of 2′-fluoro and 2′-O-methyl modified pyrimidines; (v) a mixture of 2′-O-methyl and 2′-O-methoxyethyl modified pyrimidines; (vi) a mixture of 2′-fluoro and 2′-O-methoxyethyl modified pyrimidines; or (vii) a mixture of 2′-fluoro, 2′-O-methyl, and 2′-O-methoxyethyl modified pyrimidines. In some embodiments, a deoxy nucleoside may be included in the sense strand. In some embodiments, the sense strand includes the deoxy nucleoside. The deoxy nucleoside may be at nucleoside position 9 of the sense strand. In some embodiments, the sense strand does not include a deoxy nucleoside. The deoxy nucleoside of the sense strand may be otherwise unmodified.

[0220] In some embodiments, the siRNA comprises the sense strand and/or the antisense strand sequence of an siRNA in Table 9, or a nucleic acid sequence thereof having 3 or 4 nucleoside substitutions, additions, or deletions. In some embodiments, the siRNA comprises the sense strand and/or the antisense strand sequence of an siRNA in Table 9, or a nucleic acid sequence thereof having 1 or 2 nucleoside substitutions, additions, or deletions. In some embodiments, the siRNA comprises the sense strand and/or the antisense strand sequence of an siRNA in Table 9. The siRNA may include the same internucleoside linkage modifications or nucleoside modifications as those in Table 9. The siRNA may include any different internucleoside linkage modifications or nucleoside modifications different from those in Table 9. The siRNA may include some unmodified internucleoside linkages or nucleosides.

[0221] In some embodiments, the siRNA comprises the sense strand and/or the antisense strand sequence of an siRNA in Table 10, or a nucleic acid sequence thereof having 3 or 4 nucleoside substitutions, additions, or deletions. In some embodiments, the siRNA comprises the sense strand and/or the antisense strand sequence of an siRNA in Table 10, or a nucleic acid sequence thereof having 1 or 2 nucleoside substitutions, additions, or deletions. In some embodiments, the siRNA comprises the sense strand and/or the antisense strand sequence of an siRNA in Table 10. The siRNA may include the same internucleoside linkage modifications or nucleoside modifications as those in Table 10. The siRNA may include any different internucleoside linkage modifications or nucleoside modifications different from those in Table 10. The siRNA may include some unmodified internucleoside linkages or nucleosides.

[0222] In some embodiments, the siRNA comprises the sense strand and/or the antisense strand sequence of an siRNA in Table 12A, or a nucleic acid sequence thereof having 3 or 4 nucleoside substitutions, additions, or deletions. In some embodiments, the siRNA comprises the sense strand and/or the antisense strand sequence of an siRNA in Table 12A, or a nucleic acid sequence thereof having 1 or 2 nucleoside substitutions, additions, or deletions. In some embodiments, the siRNA comprises the sense strand and/or the antisense strand sequence of an siRNA in Table 12A. The siRNA may include the same internucleoside linkage modifications or nucleoside modifications as those in Table 12A. The siRNA may include any different internucleoside linkage modifications or nucleoside modifications different from those in Table 12A. The siRNA may include some unmodified internucleoside linkages or nucleosides.

[0223] In some embodiments, the siRNA comprises the sense strand and/or the antisense strand sequence of an siRNA in Table 14A, or a nucleic acid sequence thereof having 3 or 4 nucleoside substitutions, additions, or deletions. In some embodiments, the siRNA comprises the sense strand and/or the antisense strand sequence of an siRNA in Table 14A, or a nucleic acid sequence thereof having 1 or 2 nucleoside substitutions, additions, or deletions. In some embodiments, the siRNA comprises the sense strand and/or the antisense strand sequence of an siRNA in Table 14A. The siRNA may include the same internucleoside linkage modifications or nucleoside modifications as those in Table 14A. The siRNA may include any different internucleoside linkage modifications or nucleoside modifications different from those in Table 14A. The siRNA may include some unmodified internucleoside linkages or nucleosides.

[0224] In some embodiments, the siRNA comprises the sense strand and/or the antisense strand sequence of an siRNA in Table 16A, or a nucleic acid sequence thereof having 3 or 4 nucleoside substitutions, additions, or deletions. In some embodiments, the siRNA comprises the sense strand and/or the antisense strand sequence of an siRNA in Table 16A, or a nucleic acid sequence thereof having 1 or 2 nucleoside substitutions, additions, or deletions. In some embodiments, the siRNA comprises the sense strand and/or the antisense strand sequence of an siRNA in Table 16A. The siRNA may include the same internucleoside linkage modifications or nucleoside modifications as those in Table 16A. The siRNA may include any different internucleoside linkage modifications or nucleoside modifications different from those in Table 16A. The siRNA may include some unmodified internucleoside linkages or nucleosides.

[0225] In some embodiments, the siRNA comprises the sense strand and/or the antisense strand sequence of an siRNA in Table 23, or a nucleic acid sequence thereof having 3 or 4 nucleoside substitutions, additions, or deletions. In some embodiments, the siRNA comprises the sense strand and/or the antisense strand sequence of an siRNA in Table 23, or a nucleic acid sequence thereof having 1 or 2 nucleoside substitutions, additions, or deletions. In some embodiments, the siRNA comprises the sense strand and/or the antisense strand sequence of an siRNA in Table 23. The siRNA may include the same internucleoside linkage modifications or nucleoside modifications as those in Table 23. The siRNA may include any different internucleoside linkage modifications or nucleoside modifications different from those in Table 23. The siRNA may include some unmodified internucleoside linkages or nucleosides.

[0226] In some embodiments, the siRNA comprises the sense strand and/or the antisense strand sequence of an siRNA in Table 27, or a nucleic acid sequence thereof having 3 or 4 nucleoside substitutions, additions, or deletions. In some embodiments, the siRNA comprises the sense strand and/or the antisense strand sequence of an siRNA in Table 27, or a nucleic acid sequence thereof having 1 or 2 nucleoside substitutions, additions, or deletions. In some embodiments, the siRNA comprises the sense strand and/or the antisense strand sequence of an siRNA in Table 27. The siRNA may include the same internucleoside linkage modifications or nucleoside modifications as those in Table 27. The siRNA may include any different internucleoside linkage modifications or nucleoside modifications different from those in Table 27. The siRNA may include some unmodified internucleoside linkages or nucleosides.

[0227] In some embodiments, the siRNA comprises the sense strand and/or the antisense strand sequence of an siRNA in Table 27, or a nucleic acid sequence thereof having 3 or 4 nucleoside substitutions, additions, or deletions. In some embodiments, the siRNA comprises the sense strand and/or the antisense strand sequence of an siRNA in Table 27, or a nucleic acid sequence thereof having 1 or 2 nucleoside substitutions, additions, or deletions. In some embodiments, the siRNA comprises the sense strand and/or the antisense strand sequence of an siRNA in Table 27. The siRNA may include the same internucleoside linkage modifications or nucleoside modifications as those in Table 27. The siRNA may include any different internucleoside linkage modifications or nucleoside modifications different from those in Table 27. The siRNA may include some unmodified internucleoside linkages or nucleosides.

[0228] In some embodiments, the siRNA comprises the sense strand and/or the antisense strand sequence of an siRNA in Table 30, or a nucleic acid sequence thereof having 3 or 4 nucleoside substitutions, additions, or deletions. In some embodiments, the siRNA comprises the sense strand and/or the antisense strand sequence of an siRNA in Table 30, or a nucleic acid sequence thereof having 1 or 2 nucleoside substitutions, additions, or deletions. In some embodiments, the siRNA comprises the sense strand and/or the antisense strand sequence of an siRNA in Table 30. The siRNA may include the same internucleoside linkage modifications or nucleoside modifications as those in Table 30. The siRNA may include any different internucleoside linkage modifications or nucleoside modifications different from those in Table 30. The siRNA may include some unmodified internucleoside linkages or nucleosides.

[0229] In some embodiments, the siRNA comprises the sense strand and/or the antisense strand sequence of an siRNA in Table 33, or a nucleic acid sequence thereof having 3 or 4 nucleoside substitutions, additions, or deletions. In some embodiments, the siRNA comprises the sense strand and/or the antisense strand sequence of an siRNA in Table 33, or a nucleic acid sequence thereof having 1 or 2 nucleoside substitutions, additions, or deletions. In some embodiments, the siRNA comprises the sense strand and/or the antisense strand sequence of an siRNA in Table 33. The siRNA may include the same internucleoside linkage modifications or nucleoside modifications as those in Table 33. The siRNA may include any different internucleoside linkage modifications or nucleoside modifications different from those in Table 33. The siRNA may include some unmodified internucleoside linkages or nucleosides.

[0230] In some embodiments, the siRNA comprises the sense strand and/or the antisense strand sequence of an siRNA in Table 36, or a nucleic acid sequence thereof having 3 or 4 nucleoside substitutions, additions, or deletions. In some embodiments, the siRNA comprises the sense strand and/or the antisense strand sequence of an siRNA in Table 36, or a nucleic acid sequence thereof having 1 or 2 nucleoside substitutions, additions, or deletions. In some embodiments, the siRNA comprises the sense strand and/or the antisense strand sequence of an siRNA in Table 36. The siRNA may include the same internucleoside linkage modifications or nucleoside modifications as those in Table 36. The siRNA may include any different internucleoside linkage modifications or nucleoside modifications different from those in Table 36. The siRNA may include some unmodified internucleoside linkages or nucleosides.

[0231] In some embodiments, the siRNA comprises the sense strand and/or the antisense strand sequence of an siRNA in Table 39, or a nucleic acid sequence thereof having 3 or 4 nucleoside substitutions, additions, or deletions. In some embodiments, the siRNA comprises the sense strand and/or the antisense strand sequence of an siRNA in Table 39, or a nucleic acid sequence thereof having 1 or 2 nucleoside substitutions, additions, or deletions. In some embodiments, the siRNA comprises the sense strand and/or the antisense strand sequence of an siRNA in Table 39. The siRNA may include the same internucleoside linkage modifications or nucleoside modifications as those in Table 39. The siRNA may include any different internucleoside linkage modifications or nucleoside modifications different from those in Table 39. The siRNA may include some unmodified internucleoside linkages or nucleosides.

[0232] In some embodiments, the siRNA comprises the sense strand and/or the antisense strand sequence of an siRNA in Table 41, or a nucleic acid sequence thereof having 3 or 4 nucleoside substitutions, additions, or deletions. In some embodiments, the siRNA comprises the sense strand and/or the antisense strand sequence of an siRNA in Table 41, or a nucleic acid sequence thereof having 1 or 2 nucleoside substitutions, additions, or deletions. In some embodiments, the siRNA comprises the sense strand and/or the antisense strand sequence of an siRNA in Table 41. The siRNA may include the same internucleoside linkage modifications or nucleoside modifications as those in Table 41. The siRNA may include any different internucleoside linkage modifications or nucleoside modifications different from those in Table 41. The siRNA may include some unmodified internucleoside linkages or nucleosides.

[0233] In some embodiments, the siRNA comprises the sense strand and/or the antisense strand sequence of an siRNA in Table 49, or a nucleic acid sequence thereof having 3 or 4 nucleoside substitutions, additions, or deletions. In some embodiments, the siRNA comprises the sense strand and/or the antisense strand sequence of an siRNA in Table 49, or a nucleic acid sequence thereof having 1 or 2 nucleoside substitutions, additions, or deletions. In some embodiments, the siRNA comprises the sense strand and/or the antisense strand sequence of an siRNA in Table 49. The siRNA may include the same internucleoside linkage modifications or nucleoside modifications as those in Table 49. The siRNA may include any different internucleoside linkage modifications or nucleoside modifications different from those in Table 49. The siRNA may include some unmodified internucleoside linkages or nucleosides.

[0234] In some embodiments, the siRNA comprises the sense strand and/or the antisense strand sequence of an siRNA in Table 52A, or a nucleic acid sequence thereof having 3 or 4 nucleoside substitutions, additions, or deletions. In some embodiments, the siRNA comprises the sense strand and/or the antisense strand sequence of an siRNA in Table 52A, or a nucleic acid sequence thereof having 1 or 2 nucleoside substitutions, additions, or deletions. In some embodiments, the siRNA comprises the sense strand and/or the antisense strand sequence of an siRNA in Table 52A. The siRNA may include the same internucleoside linkage modifications or nucleoside modifications as those in Table 52A. The siRNA may include any different internucleoside linkage modifications or nucleoside modifications different from those in Table 52A. The siRNA may include some unmodified internucleoside linkages or nucleosides.

[0235] In some embodiments, the siRNA comprises the sense strand and/or the antisense strand sequence of an siRNA in Table 54A, or a nucleic acid sequence thereof having 3 or 4 nucleoside substitutions, additions, or deletions. In some embodiments, the siRNA comprises the sense strand and/or the antisense strand sequence of an siRNA in Table 54A, or a nucleic acid sequence thereof having 1 or 2 nucleoside substitutions, additions, or deletions. In some embodiments, the siRNA comprises the sense strand and/or the antisense strand sequence of an siRNA in Table 54A. The siRNA may include the same internucleoside linkage modifications or nucleoside modifications as those in Table 54A. The siRNA may include any different internucleoside linkage modifications or nucleoside modifications different from those in Table 54A. The siRNA may include some unmodified internucleoside linkages or nucleosides.

[0236] In some embodiments, the siRNA comprises the sense strand and/or the antisense strand sequence of an siRNA in Table 56, or a nucleic acid sequence thereof having 3 or 4 nucleoside substitutions, additions, or deletions. In some embodiments, the siRNA comprises the sense strand and/or the antisense strand sequence of an siRNA in Table 56, or a nucleic acid sequence thereof having 1 or 2 nucleoside substitutions, additions, or deletions. In some embodiments, the siRNA comprises the sense strand and/or the antisense strand sequence of an siRNA in Table 56. The siRNA may include the same internucleoside linkage modifications or nucleoside modifications as those in Table 56. The siRNA may include any different internucleoside linkage modifications or nucleoside modifications different from those in Table 56. The siRNA may include some unmodified internucleoside linkages or nucleosides.

[0237] In some embodiments, the siRNA comprises the sense strand and/or the antisense strand sequence of an siRNA in Table 59, or a nucleic acid sequence thereof having 3 or 4 nucleoside substitutions, additions, or deletions. In some embodiments, the siRNA comprises the sense strand and/or the antisense strand sequence of an siRNA in Table 59, or a nucleic acid sequence thereof having 1 or 2 nucleoside substitutions, additions, or deletions. In some embodiments, the siRNA comprises the sense strand and/or the antisense strand sequence of an siRNA in Table 59. The siRNA may include the same internucleoside linkage modifications or nucleoside modifications as those in Table 59. The siRNA may include any different internucleoside linkage modifications or nucleoside modifications different from those in Table 59. The siRNA may include some unmodified internucleoside linkages or nucleosides.

[0238] In some embodiments, the siRNA comprises the sense strand and/or the antisense strand sequence of an siRNA in Table 62A, or a nucleic acid sequence thereof having 3 or 4 nucleoside substitutions, additions, or deletions. In some embodiments, the siRNA comprises the sense strand and/or the antisense strand sequence of an siRNA in Table 62A, or a nucleic acid sequence thereof having 1 or 2 nucleoside substitutions, additions, or deletions. In some embodiments, the siRNA comprises the sense strand and/or the antisense strand sequence of an siRNA in Table 62A. The siRNA may include the same internucleoside linkage modifications or nucleoside modifications as those in Table 62A. The siRNA may include any different internucleoside linkage modifications or nucleoside modifications different from those in Table 62A. The siRNA may include some unmodified internucleoside linkages or nucleosides.

[0239] In some embodiments, the siRNA comprises the sense strand and/or the antisense strand sequence of an siRNA in Table 64A, or a nucleic acid sequence thereof having 3 or 4 nucleoside substitutions, additions, or deletions. In some embodiments, the siRNA comprises the sense strand and/or the antisense strand sequence of an siRNA in Table 64A, or a nucleic acid sequence thereof having 1 or 2 nucleoside substitutions, additions, or deletions. In some embodiments, the siRNA comprises the sense strand and/or the antisense strand sequence of an siRNA in Table 64A. The siRNA may include the same internucleoside linkage modifications or nucleoside modifications as those in Table 64A. The siRNA may include any different internucleoside linkage modifications or nucleoside modifications different from those in Table 64A. The siRNA may include some unmodified internucleoside linkages or nucleosides

[0240] In some embodiments, the siRNA comprises the sense strand and/or the antisense strand sequence of an siRNA in Table 67A, or a nucleic acid sequence thereof having 3 or 4 nucleoside substitutions, additions, or deletions. In some embodiments, the siRNA comprises the sense strand and/or the antisense strand sequence of an siRNA in Table 67A, or a nucleic acid sequence thereof having 1 or 2 nucleoside substitutions, additions, or deletions. In some embodiments, the siRNA comprises the sense strand and/or the antisense strand sequence of an siRNA in Table 67A. The siRNA may include the same internucleoside linkage modifications or nucleoside modifications as those in Table 67A. The siRNA may include any different internucleoside linkage modifications or nucleoside modifications different from those in Table 67A. The siRNA may include some unmodified internucleoside linkages or nucleosides.

[0241] In some embodiments, the siRNA comprises the sense strand and/or the antisense strand sequence of an siRNA in Table 68, or a nucleic acid sequence thereof having 3 or 4 nucleoside substitutions, additions, or deletions. In some embodiments, the siRNA comprises the sense strand and/or the antisense strand sequence of an siRNA in Table 68, or a nucleic acid sequence thereof having 1 or 2 nucleoside substitutions, additions, or deletions. In some embodiments, the siRNA comprises the sense strand and/or the antisense strand sequence of an siRNA in Table 68. The siRNA may include the same internucleoside linkage modifications or nucleoside modifications as those in Table 68. The siRNA may include any different internucleoside linkage modifications or nucleoside modifications different from those in Table 68. The siRNA may include some unmodified internucleoside linkages or nucleosides.

[0242] In some embodiments, the siRNA comprises the sense strand and/or the antisense strand sequence of an siRNA in Table 71, or a nucleic acid sequence thereof having 3 or 4 nucleoside substitutions, additions, or deletions. In some embodiments, the siRNA comprises the sense strand and/or the antisense strand sequence of an siRNA in Table 71, or a nucleic acid sequence thereof having 1 or 2 nucleoside substitutions, additions, or deletions. In some embodiments, the siRNA comprises the sense strand and/or the antisense strand sequence of an siRNA in Table 71. The siRNA may include the same internucleoside linkage modifications or nucleoside modifications as those in Table 71. The siRNA may include any different internucleoside linkage modifications or nucleoside modifications different from those in Table 71. The siRNA may include some unmodified internucleoside linkages or nucleosides.

[0243] In some embodiments, the siRNA comprises the sense strand and/or the antisense strand sequence of an siRNA in Table 74, or a nucleic acid sequence thereof having 3 or 4 nucleoside substitutions, additions, or deletions. In some embodiments, the siRNA comprises the sense strand and/or the antisense strand sequence of an siRNA in Table 74, or a nucleic acid sequence thereof having 1 or 2 nucleoside substitutions, additions, or deletions. In some embodiments, the siRNA comprises the sense strand and/or the antisense strand sequence of an siRNA in Table 74. The siRNA may include the same internucleoside linkage modifications or nucleoside modifications as those in Table 74. The siRNA may include any different internucleoside linkage modifications or nucleoside modifications different from those in Table 74. The siRNA may include some unmodified internucleoside linkages or nucleosides.

[0244] In some embodiments, the siRNA comprises the sense strand and/or the antisense strand sequence of an siRNA in Table 77, or a nucleic acid sequence thereof having 3 or 4 nucleoside substitutions, additions, or deletions. In some embodiments, the siRNA comprises the sense strand and/or the antisense strand sequence of an siRNA in Table 77, or a nucleic acid sequence thereof having 1 or 2 nucleoside substitutions, additions, or deletions. In some embodiments, the siRNA comprises the sense strand and/or the antisense strand sequence of an siRNA in Table 77. The siRNA may include the same internucleoside linkage modifications or nucleoside modifications as those in Table 77. The siRNA may include any different internucleoside linkage modifications or nucleoside modifications different from those in Table 77. The siRNA may include some unmodified internucleoside linkages or nucleosides.

[0245] In some embodiments, the siRNA comprises the sense strand and/or the antisense strand sequence of an siRNA in Table 80, or a nucleic acid sequence thereof having 3 or 4 nucleoside substitutions, additions, or deletions. In some embodiments, the siRNA comprises the sense strand and/or the antisense strand sequence of an siRNA in Table 80, or a nucleic acid sequence thereof having 1 or 2 nucleoside substitutions, additions, or deletions. In some embodiments, the siRNA comprises the sense strand and/or the antisense strand sequence of an siRNA in Table 80. The siRNA may include the same internucleoside linkage modifications or nucleoside modifications as those in Table 80. The siRNA may include any different internucleoside linkage modifications or nucleoside modifications different from those in Table 80. The siRNA may include some unmodified internucleoside linkages or nucleosides.

[0246] In some embodiments, the siRNA comprises the sense strand and/or the antisense strand sequence of an siRNA in Table 83, or a nucleic acid sequence thereof having 3 or 4 nucleoside substitutions, additions, or deletions. In some embodiments, the siRNA comprises the sense strand and/or the antisense strand sequence of an siRNA in Table 83, or a nucleic acid sequence thereof having 1 or 2 nucleoside substitutions, additions, or deletions. In some embodiments, the siRNA comprises the sense strand and/or the antisense strand sequence of an siRNA in Table 83. The siRNA may include the same internucleoside linkage modifications or nucleoside modifications as those in Table 83. The siRNA may include any different internucleoside linkage modifications or nucleoside modifications different from those in Table 83. The siRNA may include some unmodified internucleoside linkages or nucleosides.

[0247] In some embodiments, the siRNA comprises the sense strand and/or the antisense strand sequence of an siRNA in Table 86, or a nucleic acid sequence thereof having 3 or 4 nucleoside substitutions, additions, or deletions. In some embodiments, the siRNA comprises the sense strand and/or the antisense strand sequence of an siRNA in Table 86, or a nucleic acid sequence thereof having 1 or 2 nucleoside substitutions, additions, or deletions. In some embodiments, the siRNA comprises the sense strand and/or the antisense strand sequence of an siRNA in Table 86. The siRNA may include the same internucleoside linkage modifications or nucleoside modifications as those in Table 86. The siRNA may include any different internucleoside linkage modifications or nucleoside modifications different from those in Table 86. The siRNA may include some unmodified internucleoside linkages or nucleosides.

[0248] In some embodiments, the siRNA comprises the sense strand and/or the antisense strand sequence of an siRNA in Table 89, or a nucleic acid sequence thereof having 3 or 4 nucleoside substitutions, additions, or deletions. In some embodiments, the siRNA comprises the sense strand and/or the antisense strand sequence of an siRNA in Table 89, or a nucleic acid sequence thereof having 1 or 2 nucleoside substitutions, additions, or deletions. In some embodiments, the siRNA comprises the sense strand and/or the antisense strand sequence of an siRNA in Table 89. The siRNA may include the same internucleoside linkage modifications or nucleoside modifications as those in Table 89. The siRNA may include any different internucleoside linkage modifications or nucleoside modifications different from those in Table 89. The siRNA may include some unmodified internucleoside linkages or nucleosides.

[0249] In some embodiments, the siRNA comprises the sense strand and/or the antisense strand sequence of an siRNA in Table 92, or a nucleic acid sequence thereof having 3 or 4 nucleoside substitutions, additions, or deletions. In some embodiments, the siRNA comprises the sense strand and/or the antisense strand sequence of an siRNA in Table 92, or a nucleic acid sequence thereof having 1 or 2 nucleoside substitutions, additions, or deletions. In some embodiments, the siRNA comprises the sense strand and/or the antisense strand sequence of an siRNA in Table 92. The siRNA may include the same internucleoside linkage modifications or nucleoside modifications as those in Table 92. The siRNA may include any different internucleoside linkage modifications or nucleoside modifications different from those in Table 92. The siRNA may include some unmodified internucleoside linkages or nucleosides.

[0250] In some embodiments, the siRNA comprises the sense strand and/or the antisense strand sequence of an siRNA in Table 95, or a nucleic acid sequence thereof having 3 or 4 nucleoside substitutions, additions, or deletions. In some embodiments, the siRNA comprises the sense strand and/or the antisense strand sequence of an siRNA in Table 95, or a nucleic acid sequence thereof having 1 or 2 nucleoside substitutions, additions, or deletions. In some embodiments, the siRNA comprises the sense strand and/or the antisense strand sequence of an siRNA in Table 95. The siRNA may include the same internucleoside linkage modifications or nucleoside modifications as those in Table 95. The siRNA may include any different internucleoside linkage modifications or nucleoside modifications different from those in Table 95. The siRNA may include some unmodified internucleoside linkages or nucleosides.

[0251] In some embodiments, the siRNA comprises the sense strand and/or the antisense strand sequence of an siRNA in Table 98, or a nucleic acid sequence thereof having 3 or 4 nucleoside substitutions, additions, or deletions. In some embodiments, the siRNA comprises the sense strand and/or the antisense strand sequence of an siRNA in Table 98, or a nucleic acid sequence thereof having 1 or 2 nucleoside substitutions, additions, or deletions. In some embodiments, the siRNA comprises the sense strand and/or the antisense strand sequence of an siRNA in Table 98. The siRNA may include the same internucleoside linkage modifications or nucleoside modifications as those in Table 98. The siRNA may include any different internucleoside linkage modifications or nucleoside modifications different from those in Table 92. The siRNA may include some unmodified internucleoside linkages or nucleosides.

[0252] In some embodiments, the siRNA comprises a sense strand having a sequence in accordance with SEQ ID NO: 3296-3299. In some embodiments, the sense strand sequence comprises or consists of sequence at least 75% identical to SEQ ID NO: 3296-3299, at least 80% identical to SEQ ID NO: 3296-3299, at least 85% identical to SEQ ID NO: 3296-3299, at least 90% identical to SEQ ID NO: 3296-3299, or at least 95% identical to SEQ ID NO: 3296-3299. In some embodiments, the sense strand sequence comprises or consists of the sequence of SEQ ID NO: 3296-3299, or a sense strand sequence thereof having 1, 2, 3, or 4 nucleoside substitutions, additions, or deletions. In some embodiments, the sense strand sequence comprises or consists of the sequence of SEQ ID NO: 3296-3299, or a sense strand sequence thereof having 1 or 2 nucleoside substitutions, additions, or deletions. In some embodiments, the sense strand sequence comprises or consists of a sequence 100% identical to SEQ ID NO: 3296-3299. The sense strand may comprise a moiety such as a GalNAc moiety or a lipid moiety.

[0253] In some embodiments, the siRNA comprises a sense strand having a sequence in accordance with SEQ ID NO: 3305-3318 or 3339. In some embodiments, the sense strand sequence comprises or consists of sequence at least 75% identical to SEQ ID NO: 3305-3318 or 3339, at least 80% identical to SEQ ID NO: 3305-3318 or 3339, at least 85% identical to SEQ ID NO: 3305-3318 or 3339, at least 90% identical to SEQ ID NO: 3305-3318 or 3339, or at least 95% identical to SEQ ID NO: 3305-3318 or 3339. In some embodiments, the sense strand sequence comprises or consists of the sequence of SEQ ID NO: 3305-3318 or 3339, or a sense strand sequence thereof having 1, 2, 3, or 4 nucleoside substitutions, additions, or deletions. In some embodiments, the sense strand sequence comprises or consists of the sequence of SEQ ID NO: 3305-3318 or 3339, or a sense strand sequence thereof having 1 or 2 nucleoside substitutions, additions, or deletions. In some embodiments, the sense strand sequence comprises or consists of a sequence 100% identical to SEQ ID NO: 3305-3318 or 3339. The sense strand may comprise a moiety such as a GalNAc moiety or a lipid moiety.

[0254] In some embodiments, the siRNA comprises a sense strand having a sequence in accordance with SEQ ID NO: 2472. In some embodiments, the sense strand sequence comprises or consists of sequence at least 75% identical to SEQ ID NO: 2472, at least 80% identical to SEQ ID NO: 2472, at least 85% identical to SEQ ID NO: 2472, at least 90% identical to SEQ ID NO: 2472, or at least 95% identical to SEQ ID NO: 2472. In some embodiments, the sense strand sequence comprises or consists of the sequence of SEQ ID NO: 2472, or a sense strand sequence thereof having 1, 2, 3, or 4 nucleoside substitutions, additions, or deletions. In some embodiments, the sense strand sequence comprises or consists of the sequence of SEQ ID NO: 2472, or a sense strand sequence thereof having 1 or 2 nucleoside substitutions, additions, or deletions. In some embodiments, the sense strand sequence comprises or consists of a sequence 100% identical to SEQ ID NO: 2472. The sense strand may comprise a moiety such as a GalNAc moiety or a lipid moiety. In some embodiments, the siRNA comprises an antisense strand having a sequence in accordance with SEQ ID NO: 2489. In some embodiments, the antisense strand sequence comprises or consists of sequence at least 75% identical to SEQ ID NO: 2489, at least 80% identical to SEQ ID NO: 2489, at least 85% identical to SEQ ID NO: 2489, at least 90% identical to SEQ ID NO: 2489, or at least 95% identical to SEQ ID NO: 2489. In some embodiments, the antisense strand sequence comprises or consists of the sequence of SEQ ID NO: 2489, or an antisense strand sequence thereof having 1, 2, 3, or 4 nucleoside substitutions, additions, or deletions. In some embodiments, the antisense strand sequence comprises or consists of the sequence of SEQ ID NO: 2489, or an antisense strand sequence thereof having 1 or 2 nucleoside substitutions, additions, or deletions. In some embodiments, the antisense strand sequence comprises or consists of a sequence 100% identical to SEQ ID NO: 2489. The antisense strand may comprise a moiety such as a GalNAc moiety or a lipid moiety.

[0255] In some embodiments, the siRNA comprises a sense strand having a sequence in accordance with SEQ ID NO: 2478. In some embodiments, the sense strand sequence comprises or consists of sequence at least 75% identical to SEQ ID NO: 2478, at least 80% identical to SEQ ID NO: 2478, at least 85% identical to SEQ ID NO: 2478, at least 90% identical to SEQ ID NO: 2478, or at least 95% identical to SEQ ID NO: 2478. In some embodiments, the sense strand sequence comprises or consists of the sequence of SEQ ID NO: 2478, or a sense strand sequence thereof having 1, 2, 3, or 4 nucleoside substitutions, additions, or deletions. In some embodiments, the sense strand sequence comprises or consists of the sequence of SEQ ID NO: 2478, or a sense strand sequence thereof having 1 or 2 nucleoside substitutions, additions, or deletions. In some embodiments, the sense strand sequence comprises or consists of a sequence 100% identical to SEQ ID NO: 2478. The sense strand may comprise a moiety such as a GalNAc moiety or a lipid moiety. In some embodiments, the siRNA comprises an antisense strand having a sequence in accordance with SEQ ID NO: 2495. In some embodiments, the antisense strand sequence comprises or consists of sequence at least 75% identical to SEQ ID NO: 2495, at least 80% identical to SEQ ID NO: 2495, at least 85% identical to SEQ ID NO: 2495, at least 90% identical to SEQ ID NO: 2495, or at least 95% identical to SEQ ID NO: 2495. In some embodiments, the antisense strand sequence comprises or consists of the sequence of SEQ ID NO: 2495, or an antisense strand sequence thereof having 1, 2, 3, or 4 nucleoside substitutions, additions, or deletions. In some embodiments, the antisense strand sequence comprises or consists of the sequence of SEQ ID NO: 2495, or an antisense strand sequence thereof having 1 or 2 nucleoside substitutions, additions, or deletions. In some embodiments, the antisense strand sequence comprises or consists of a sequence 100% identical to SEQ ID NO: 2495. The antisense strand may comprise a moiety such as a GalNAc moiety or a lipid moiety.

[0256] In some embodiments, the siRNA comprises a sense strand having a sequence in accordance with SEQ ID NO: 2479. In some embodiments, the sense strand sequence comprises or consists of sequence at least 75% identical to SEQ ID NO: 2479, at least 80% identical to SEQ ID NO: 2479, at least 85% identical to SEQ ID NO: 2479, at least 90% identical to SEQ ID NO: 2479, or at least 95% identical to SEQ ID NO: 2479. In some embodiments, the sense strand sequence comprises or consists of the sequence of SEQ ID NO: 2479, or a sense strand sequence thereof having 1, 2, 3, or 4 nucleoside substitutions, additions, or deletions. In some embodiments, the sense strand sequence comprises or consists of the sequence of SEQ ID NO: 2479, or a sense strand sequence thereof having 1 or 2 nucleoside substitutions, additions, or deletions. In some embodiments, the sense strand sequence comprises or consists of a sequence 100% identical to SEQ ID NO: 2479. The sense strand may comprise a moiety such as a GalNAc moiety or a lipid moiety. In some embodiments, the siRNA comprises an antisense strand having a sequence in accordance with SEQ ID NO: 2496. In some embodiments, the antisense strand sequence comprises or consists of sequence at least 75% identical to SEQ ID NO: 2496, at least 80% identical to SEQ ID NO: 2496, at least 85% identical to SEQ ID NO: 2496, at least 90% identical to SEQ ID NO: 2496, or at least 95% identical to SEQ ID NO: 2496. In some embodiments, the antisense strand sequence comprises or consists of the sequence of SEQ ID NO: 2496, or an antisense strand sequence thereof having 1, 2, 3, or 4 nucleoside substitutions, additions, or deletions. In some embodiments, the antisense strand sequence comprises or consists of the sequence of SEQ ID NO: 2496, or an antisense strand sequence thereof having 1 or 2 nucleoside substitutions, additions, or deletions. In some embodiments, the antisense strand sequence comprises or consists of a sequence 100% identical to SEQ ID NO: 2496. The antisense strand may comprise a moiety such as a GalNAc moiety or a lipid moiety.

[0257] In some embodiments, the siRNA comprises a sense strand having a sequence in accordance with SEQ ID NO: 2480. In some embodiments, the sense strand sequence comprises or consists of sequence at least 75% identical to SEQ ID NO: 2480, at least 80% identical to SEQ ID NO: 2480, at least 85% identical to SEQ ID NO: 2480, at least 90% identical to SEQ ID NO: 2480, or at least 95% identical to SEQ ID NO: 2480. In some embodiments, the sense strand sequence comprises or consists of the sequence of SEQ ID NO: 2480, or a sense strand sequence thereof having 1, 2, 3, or 4 nucleoside substitutions, additions, or deletions. In some embodiments, the sense strand sequence comprises or consists of the sequence of SEQ ID NO: 2480, or a sense strand sequence thereof having 1 or 2 nucleoside substitutions, additions, or deletions. In some embodiments, the sense strand sequence comprises or consists of a sequence 100% identical to SEQ ID NO: 2480. The sense strand may comprise a moiety such as a GalNAc moiety or a lipid moiety. In some embodiments, the siRNA comprises an antisense strand having a sequence in accordance with SEQ ID NO: 2497. In some embodiments, the antisense strand sequence comprises or consists of sequence at least 75% identical to SEQ ID NO: 2497, at least 80% identical to SEQ ID NO: 2497, at least 85% identical to SEQ ID NO: 2497, at least 90% identical to SEQ ID NO: 2497, or at least 95% identical to SEQ ID NO: 2497. In some embodiments, the antisense strand sequence comprises or consists of the sequence of SEQ ID NO: 2497, or an antisense strand sequence thereof having 1, 2, 3, or 4 nucleoside substitutions, additions, or deletions. In some embodiments, the antisense strand sequence comprises or consists of the sequence of SEQ ID NO: 2497, or an antisense strand sequence thereof having 1 or 2 nucleoside substitutions, additions, or deletions. In some embodiments, the antisense strand sequence comprises or consists of a sequence 100% identical to SEQ ID NO: 2497. The antisense strand may comprise a moiety such as a GalNAc moiety or a lipid moiety.

[0258] In some embodiments, the siRNA comprises a sense strand having a sequence in accordance with SEQ ID NO: 2507. In some embodiments, the sense strand sequence comprises or consists of sequence at least 75% identical to SEQ ID NO: 2507, at least 80% identical to SEQ ID NO: 2507, at least 85% identical to SEQ ID NO: 2507, at least 90% identical to SEQ ID NO: 2507, or at least 95% identical to SEQ ID NO: 2507. In some embodiments, the sense strand sequence comprises or consists of the sequence of SEQ ID NO: 2507, or a sense strand sequence thereof having 1, 2, 3, or 4 nucleoside substitutions, additions, or deletions. In some embodiments, the sense strand sequence comprises or consists of the sequence of SEQ ID NO: 2507, or a sense strand sequence thereof having 1 or 2 nucleoside substitutions, additions, or deletions. In some embodiments, the sense strand sequence comprises or consists of a sequence 100% identical to SEQ ID NO: 2507. The sense strand may comprise a moiety such as a GalNAc moiety or a lipid moiety. In some embodiments, the siRNA comprises an antisense strand having a sequence in accordance with SEQ ID NO: 2517. In some embodiments, the antisense strand sequence comprises or consists of sequence at least 75% identical to SEQ ID NO: 2517, at least 80% identical to SEQ ID NO: 2517, at least 85% identical to SEQ ID NO: 2517, at least 90% identical to SEQ ID NO: 2517, or at least 95% identical to SEQ ID NO: 2517. In some embodiments, the antisense strand sequence comprises or consists of the sequence of SEQ ID NO: 2517, or an antisense strand sequence thereof having 1, 2, 3, or 4 nucleoside substitutions, additions, or deletions. In some embodiments, the antisense strand sequence comprises or consists of the sequence of SEQ ID NO: 2517, or an antisense strand sequence thereof having 1 or 2 nucleoside substitutions, additions, or deletions. In some embodiments, the antisense strand sequence comprises or consists of a sequence 100% identical to SEQ ID NO: 2517. The antisense strand may comprise a moiety such as a GalNAc moiety or a lipid moiety.

[0259] In some embodiments, the siRNA comprises a sense strand having a sequence in accordance with SEQ ID NO: 3239. In some embodiments, the sense strand sequence comprises or consists of sequence at least 75% identical to SEQ ID NO: 3239, at least 80% identical to SEQ ID NO: 3239, at least 85% identical to SEQ ID NO: 3239, at least 90% identical to SEQ ID NO: 3239, or at least 95% identical to SEQ ID NO: 3239. In some embodiments, the sense strand sequence comprises or consists of the sequence of SEQ ID NO: 3239, or a sense strand sequence thereof having 1, 2, 3, or 4 nucleoside substitutions, additions, or deletions. In some embodiments, the sense strand sequence comprises or consists of the sequence of SEQ ID NO: 3239, or a sense strand sequence thereof having 1 or 2 nucleoside substitutions, additions, or deletions. In some embodiments, the sense strand sequence comprises or consists of a sequence 100% identical to SEQ ID NO: 3239. The sense strand may comprise a moiety such as a GalNAc moiety or a lipid moiety.

[0260] In some embodiments, the siRNA comprises a sense strand having a sequence in accordance with SEQ ID NO: 3241. In some embodiments, the sense strand sequence comprises or consists of sequence at least 75% identical to SEQ ID NO: 3241, at least 80% identical to SEQ ID NO: 3241, at least 85% identical to SEQ ID NO: 3241, at least 90% identical to SEQ ID NO: 3241, or at least 95% identical to SEQ ID NO: 3241. In some embodiments, the sense strand sequence comprises or consists of the sequence of SEQ ID NO: 3241, or a sense strand sequence thereof having 1, 2, 3, or 4 nucleoside substitutions, additions, or deletions. In some embodiments, the sense strand sequence comprises or consists of the sequence of SEQ ID NO: 3241, or a sense strand sequence thereof having 1 or 2 nucleoside substitutions, additions, or deletions. In some embodiments, the sense strand sequence comprises or consists of a sequence 100% identical to SEQ ID NO: 3241. The sense strand may comprise a moiety such as a GalNAc moiety or a lipid moiety.

[0261] In some embodiments, the siRNA comprises a sense strand having a sequence in accordance with SEQ ID NO: 3242. In some embodiments, the sense strand sequence comprises or consists of sequence at least 75% identical to SEQ ID NO: 3242, at least 80% identical to SEQ ID NO: 3242, at least 85% identical to SEQ ID NO: 3242, at least 90% identical to SEQ ID NO: 3242, or at least 95% identical to SEQ ID NO: 3242. In some embodiments, the sense strand sequence comprises or consists of the sequence of SEQ ID NO: 3242, or a sense strand sequence thereof having 1, 2, 3, or 4 nucleoside substitutions, additions, or deletions. In some embodiments, the sense strand sequence comprises or consists of the sequence of SEQ ID NO: 3242, or a sense strand sequence thereof having 1 or 2 nucleoside substitutions, additions, or deletions. In some embodiments, the sense strand sequence comprises or consists of a sequence 100% identical to SEQ ID NO: 3242. The sense strand may comprise a moiety such as a GalNAc moiety or a lipid moiety.

[0262] In some embodiments, the siRNA comprises a sense strand having a sequence in accordance with SEQ ID NO: 3270. In some embodiments, the sense strand sequence comprises or consists of sequence at least 75% identical to SEQ ID NO: 3270, at least 80% identical to SEQ ID NO: 3270, at least 85% identical to SEQ ID NO: 3270, at least 90% identical to SEQ ID NO: 3270, or at least 95% identical to SEQ ID NO: 3270. In some embodiments, the sense strand sequence comprises or consists of the sequence of SEQ ID NO: 3270, or a sense strand sequence thereof having 1, 2, 3, or 4 nucleoside substitutions, additions, or deletions. In some embodiments, the sense strand sequence comprises or consists of the sequence of SEQ ID NO: 3270, or a sense strand sequence thereof having 1 or 2 nucleoside substitutions, additions, or deletions. In some embodiments, the sense strand sequence comprises or consists of a sequence 100% identical to SEQ ID NO: 3270. The sense strand may comprise a moiety such as a GalNAc moiety or a lipid moiety.

[0263] In some embodiments, the siRNA comprises an antisense strand having a sequence in accordance with SEQ ID NO: 3300-3304. In some embodiments, the antisense strand sequence comprises or consists of sequence at least 75% identical to SEQ ID NO: 3300-3304, at least 80% identical to SEQ ID NO: 3300-3304, at least 85% identical to SEQ ID NO: 3300-3304, at least 90% identical to SEQ ID NO: 3300-3304, or at least 95% identical to SEQ ID NO: 3300-3304. In some embodiments, the antisense strand sequence comprises or consists of the sequence of SEQ ID NO: 3300-3304, or an antisense strand sequence thereof having 1, 2, 3, or 4 nucleoside substitutions, additions, or deletions. In some embodiments, the antisense strand sequence comprises or consists of the sequence of SEQ ID NO: 3300-3304, or an antisense strand sequence thereof having 1 or 2 nucleoside substitutions, additions, or deletions. In some embodiments, the antisense strand sequence comprises or consists of a sequence 100% identical to SEQ ID NO: 3300-3304. The antisense strand may comprise a moiety such as a GalNAc moiety or a lipid moiety. The antisense strand may comprise a 5′-vinyl phosphonate (VP).

[0264] In some embodiments, the siRNA comprises an antisense strand having a sequence in accordance with SEQ ID NO: 3319-3337 or 3340. In some embodiments, the antisense strand sequence comprises or consists of sequence at least 75% identical to SEQ ID NO: 3319-3337 or 3340, at least 80% identical to SEQ ID NO: 3319-3337 or 3340, at least 85% identical to SEQ ID NO: 3319-3337 or 3340, at least 90% identical to SEQ ID NO: 3319-3337 or 3340, or at least 95% identical to SEQ ID NO: 3319-3337 or 3340. In some embodiments, the antisense strand sequence comprises or consists of the sequence of SEQ ID NO: 3319-3337 or 3340, or an antisense strand sequence thereof having 1, 2, 3, or 4 nucleoside substitutions, additions, or deletions. In some embodiments, the antisense strand sequence comprises or consists of the sequence of SEQ ID NO: 3319-3337 or 3340, or an antisense strand sequence thereof having 1 or 2 nucleoside substitutions, additions, or deletions. In some embodiments, the antisense strand sequence comprises or consists of a sequence 100% identical to SEQ ID NO: 3319-3337 or 3340. The antisense strand may comprise a moiety such as a GalNAc moiety or a lipid moiety. The antisense strand may comprise a 5′-vinyl phosphonate (VP).

[0265] In some embodiments, the siRNA comprises an antisense strand having a sequence in accordance with SEQ ID NO: 2468. In some embodiments, the antisense strand sequence comprises or consists of sequence at least 75% identical to SEQ ID NO: 2468, at least 80% identical to SEQ ID NO: 2468, at least 85% identical to SEQ ID NO: 2468, at least 90% identical to SEQ ID NO: 2468, or at least 95% identical to SEQ ID NO: 2468. In some embodiments, the antisense strand sequence comprises or consists of the sequence of SEQ ID NO: 2468, or an antisense strand sequence thereof having 1, 2, 3, or 4 nucleoside substitutions, additions, or deletions. In some embodiments, the antisense strand sequence comprises or consists of the sequence of SEQ ID NO: 2468, or an antisense strand sequence thereof having 1 or 2 nucleoside substitutions, additions, or deletions. In some embodiments, the antisense strand sequence comprises or consists of a sequence 100% identical to SEQ ID NO: 2468. The antisense strand may comprise a moiety such as a GalNAc moiety or a lipid moiety. The antisense strand may comprise a 5′-vinyl phosphonate (VP).

[0266] In some embodiments, the siRNA comprises an antisense strand having a sequence in accordance with SEQ ID NO: 3243. In some embodiments, the antisense strand sequence comprises or consists of sequence at least 75% identical to SEQ ID NO: 3243, at least 80% identical to SEQ ID NO: 3243, at least 85% identical to SEQ ID NO: 3243, at least 90% identical to SEQ ID NO: 3243, or at least 95% identical to SEQ ID NO: 3243. In some embodiments, the antisense strand sequence comprises or consists of the sequence of SEQ ID NO: 3243, or an antisense strand sequence thereof having 1, 2, 3, or 4 nucleoside substitutions, additions, or deletions. In some embodiments, the antisense strand sequence comprises or consists of the sequence of SEQ ID NO: 3243, or an antisense strand sequence thereof having 1 or 2 nucleoside substitutions, additions, or deletions. In some embodiments, the antisense strand sequence comprises or consists of a sequence 100% identical to SEQ ID NO: 3243. The antisense strand may comprise a moiety such as a GalNAc moiety or a lipid moiety. The antisense strand may comprise a 5′-vinyl phosphonate (VP).

[0267] In some embodiments, the siRNA comprises an antisense strand having a sequence in accordance with SEQ ID NO: 3244. In some embodiments, the antisense strand sequence comprises or consists of sequence at least 75% identical to SEQ ID NO: 3244, at least 80% identical to SEQ ID NO: 3244, at least 85% identical to SEQ ID NO: 3244, at least 90% identical to SEQ ID NO: 3244, or at least 95% identical to SEQ ID NO: 3244. In some embodiments, the antisense strand sequence comprises or consists of the sequence of SEQ ID NO: 3244, or an antisense strand sequence thereof having 1, 2, 3, or 4 nucleoside substitutions, additions, or deletions. In some embodiments, the antisense strand sequence comprises or consists of the sequence of SEQ ID NO: 3244, or an antisense strand sequence thereof having 1 or 2 nucleoside substitutions, additions, or deletions. In some embodiments, the antisense strand sequence comprises or consists of a sequence 100% identical to SEQ ID NO: 3244. The antisense strand may comprise a moiety such as a GalNAc moiety or a lipid moiety. The antisense strand may comprise a 5′-vinyl phosphonate (VP).

[0268] In some embodiments, the siRNA comprises an antisense strand having a sequence in accordance with SEQ ID NO: 3245. In some embodiments, the antisense strand sequence comprises or consists of sequence at least 75% identical to SEQ ID NO: 3245, at least 80% identical to SEQ ID NO: 3245, at least 85% identical to SEQ ID NO: 3245, at least 90% identical to SEQ ID NO: 3245, or at least 95% identical to SEQ ID NO: 3245. In some embodiments, the antisense strand sequence comprises or consists of the sequence of SEQ ID NO: 3245, or an antisense strand sequence thereof having 1, 2, 3, or 4 nucleoside substitutions, additions, or deletions. In some embodiments, the antisense strand sequence comprises or consists of the sequence of SEQ ID NO: 3245, or an antisense strand sequence thereof having 1 or 2 nucleoside substitutions, additions, or deletions. In some embodiments, the antisense strand sequence comprises or consists of a sequence 100% identical to SEQ ID NO: 3245. The antisense strand may comprise a moiety such as a GalNAc moiety or a lipid moiety. The antisense strand may comprise a 5′-vinyl phosphonate (VP).

[0269] In some embodiments, the siRNA comprises an antisense strand having a sequence in accordance with SEQ ID NO: 3246. In some embodiments, the antisense strand sequence comprises or consists of sequence at least 75% identical to SEQ ID NO: 3246, at least 80% identical to SEQ ID NO: 3246, at least 85% identical to SEQ ID NO: 3246, at least 90% identical to SEQ ID NO: 3246, or at least 95% identical to SEQ ID NO: 3246. In some embodiments, the antisense strand sequence comprises or consists of the sequence of SEQ ID NO: 3246, or an antisense strand sequence thereof having 1, 2, 3, or 4 nucleoside substitutions, additions, or deletions. In some embodiments, the antisense strand sequence comprises or consists of the sequence of SEQ ID NO: 3246, or an antisense strand sequence thereof having 1 or 2 nucleoside substitutions, additions, or deletions. In some embodiments, the antisense strand sequence comprises or consists of a sequence 100% identical to SEQ ID NO: 3246. The antisense strand may comprise a moiety such as a GalNAc moiety or a lipid moiety. The antisense strand may comprise a 5′-vinyl phosphonate (VP).

[0270] In some embodiments, the siRNA comprises an antisense strand having a sequence in accordance with SEQ ID NO: 3247. In some embodiments, the antisense strand sequence comprises or consists of sequence at least 75% identical to SEQ ID NO: 3247, at least 80% identical to SEQ ID NO: 3247, at least 85% identical to SEQ ID NO: 3247, at least 90% identical to SEQ ID NO: 3247, or at least 95% identical to SEQ ID NO: 3247. In some embodiments, the antisense strand sequence comprises or consists of the sequence of SEQ ID NO: 3247, or an antisense strand sequence thereof having 1, 2, 3, or 4 nucleoside substitutions, additions, or deletions. In some embodiments, the antisense strand sequence comprises or consists of the sequence of SEQ ID NO: 3247, or an antisense strand sequence thereof having 1 or 2 nucleoside substitutions, additions, or deletions. In some embodiments, the antisense strand sequence comprises or consists of a sequence 100% identical to SEQ ID NO: 3247. The antisense strand may comprise a moiety such as a GalNAc moiety or a lipid moiety. The antisense strand may comprise a 5′-vinyl phosphonate (VP).

[0271] In some embodiments, the siRNA comprises an antisense strand having a sequence in accordance with SEQ ID NO: 3248. In some embodiments, the antisense strand sequence comprises or consists of sequence at least 75% identical to SEQ ID NO: 3248, at least 80% identical to SEQ ID NO: 3248, at least 85% identical to SEQ ID NO: 3248, at least 90% identical to SEQ ID NO: 3248, or at least 95% identical to SEQ ID NO: 3248. In some embodiments, the antisense strand sequence comprises or consists of the sequence of SEQ ID NO: 3248, or an antisense strand sequence thereof having 1, 2, 3, or 4 nucleoside substitutions, additions, or deletions. In some embodiments, the antisense strand sequence comprises or consists of the sequence of SEQ ID NO: 3248, or an antisense strand sequence thereof having 1 or 2 nucleoside substitutions, additions, or deletions. In some embodiments, the antisense strand sequence comprises or consists of a sequence 100% identical to SEQ ID NO: 3248. The antisense strand may comprise a moiety such as a GalNAc moiety or a lipid moiety. The antisense strand may comprise a 5′-vinyl phosphonate (VP).

[0272] In some embodiments, the siRNA comprises an antisense strand having a sequence in accordance with SEQ ID NO: 3249. In some embodiments, the antisense strand sequence comprises or consists of sequence at least 75% identical to SEQ ID NO: 3249, at least 80% identical to SEQ ID NO: 3249, at least 85% identical to SEQ ID NO: 3249, at least 90% identical to SEQ ID NO: 3249, or at least 95% identical to SEQ ID NO: 3249. In some embodiments, the antisense strand sequence comprises or consists of the sequence of SEQ ID NO: 3249, or an antisense strand sequence thereof having 1, 2, 3, or 4 nucleoside substitutions, additions, or deletions. In some embodiments, the antisense strand sequence comprises or consists of the sequence of SEQ ID NO: 3249, or an antisense strand sequence thereof having 1 or 2 nucleoside substitutions, additions, or deletions. In some embodiments, the antisense strand sequence comprises or consists of a sequence 100% identical to SEQ ID NO: 3249. The antisense strand may comprise a moiety such as a GalNAc moiety or a lipid moiety. The antisense strand may comprise a 5′-vinyl phosphonate (VP).

[0273] In some embodiments, the siRNA comprises an antisense strand having a sequence in accordance with SEQ ID NO: 3250. In some embodiments, the antisense strand sequence comprises or consists of sequence at least 75% identical to SEQ ID NO: 3250, at least 80% identical to SEQ ID NO: 3250, at least 85% identical to SEQ ID NO: 3250, at least 90% identical to SEQ ID NO: 3250, or at least 95% identical to SEQ ID NO: 3250. In some embodiments, the antisense strand sequence comprises or consists of the sequence of SEQ ID NO: 3250, or an antisense strand sequence thereof having 1, 2, 3, or 4 nucleoside substitutions, additions, or deletions. In some embodiments, the antisense strand sequence comprises or consists of the sequence of SEQ ID NO: 3250, or an antisense strand sequence thereof having 1 or 2 nucleoside substitutions, additions, or deletions. In some embodiments, the antisense strand sequence comprises or consists of a sequence 100% identical to SEQ ID NO: 3250. The antisense strand may comprise a moiety such as a GalNAc moiety or a lipid moiety. The antisense strand may comprise a 5′-vinyl phosphonate (VP).

[0274] In some embodiments, the siRNA comprises an antisense strand having a sequence in accordance with SEQ ID NO: 3277. In some embodiments, the antisense strand sequence comprises or consists of sequence at least 75% identical to SEQ ID NO: 3277, at least 80% identical to SEQ ID NO: 3277, at least 85% identical to SEQ ID NO: 3277, at least 90% identical to SEQ ID NO: 3277, or at least 95% identical to SEQ ID NO: 3277. In some embodiments, the antisense strand sequence comprises or consists of the sequence of SEQ ID NO: 3277, or an antisense strand sequence thereof having 1, 2, 3, or 4 nucleoside substitutions, additions, or deletions. In some embodiments, the antisense strand sequence comprises or consists of the sequence of SEQ ID NO: 3277, or an antisense strand sequence thereof having 1 or 2 nucleoside substitutions, additions, or deletions. In some embodiments, the antisense strand sequence comprises or consists of a sequence 100% identical to SEQ ID NO: 3277. The antisense strand may comprise a moiety such as a GalNAc moiety or a lipid moiety. The antisense strand may comprise a 5′-vinyl phosphonate (VP).

### 4. ASO Modification Patterns

[0275] In some embodiments, the composition comprises an oligonucleotide that inhibits the expression of MTRES1, wherein the oligonucleotide comprises an antisense oligonucleotide (ASO). In some embodiments, the ASO comprises modification pattern ASO1: 5′-nsnsnsnsnsdNsdNsdNsdNsdNsdNsdNsdNsdNsdNsnsnsnsnsn-3′ (SEQ ID NO: 2461), wherein “dN” is any deoxynucleotide, “n” is a 2′-O-methyl or 2′-O-methoxyethyl-modified nucleoside, and “s” is a phosphorothioate linkage. In some embodiments, the ASO comprises modification pattern 1S1S, 2S, 3S, 4S, 5S, 6S, 7S, 8S, 9S, 10S, 11S, 12S, 13S, 14S, 15S, 16S, 17S, 18S, 19S, 20S, 21S, 22S, 23S, 24S, 25S, 26S, 27S, 28S, 29S, 30S, 31S, 32S, 33S, 34S, 35S, 36S, 37S, 38S, 39S, 40S, 41S, 42S, 43S, 44S, 45S, 45S, 46S, 47S, 48S, 49S, 50S, 51S, 52S, 53S, 54S, 55S, 56S, 57S, 1AS, 2AS, 3AS, 4AS, 5AS, 6AS, 7AS, 8AS, 9AS, 10AS, 11AS, 12AS, 13AS, 14AS, 15AS, 16AS, 17AS, 18AS, 19AS, 20AS, 21AS, 22AS, 23AS, 24AS, 25AS, 26AS, 27AS, 28AS, 29AS, 30AS, 31AS, 32AS, 34AS, 35AS, 36AS, 37AS, 38AS, 39AS, or 40AS.

### D. Formulations

[0276] In some embodiments, the composition is a pharmaceutical composition. In some embodiments, the composition is sterile. In some embodiments, the composition further comprises a pharmaceutically acceptable carrier.

[0277] In some embodiments, the pharmaceutically acceptable carrier comprises water. In some embodiments, the pharmaceutically acceptable carrier comprises a buffer. In some embodiments, the pharmaceutically acceptable carrier comprises a saline solution. In some embodiments, the pharmaceutically acceptable carrier comprises water, a buffer, or a saline solution. In some embodiments, the composition comprises a liposome. In some embodiments, the pharmaceutically acceptable carrier comprises liposomes, lipids, nanoparticles, proteins, protein-antibody complexes, peptides, cellulose, nanogel, or a combination thereof.

[0278] In some embodiments, the composition is formulated to cross the blood brain barrier. In some embodiments, the composition is formulated for central nervous system (CNS) delivery. In some embodiments, the composition includes a lipophilic compound. The lipophilic compound may be useful for crossing the blood brain barrier or for CNS delivery.

[0279] In some embodiments, the composition is formulated for administration. The administration may be systemic. In some embodiments, the administration is intravenous. In some embodiments, the administration is by injection. In some embodiments, the injection is subcutaneous. In some embodiments, the injection is subcutaneous. In some embodiments, the injection is intraperitoneal. In some embodiments, the injection is intramuscular. The administration may be to an eye (e.g. intravitreal). The administration may be to a neural tissue. The administration may be to a brain. The administration may be intracerebroventricular. In some embodiments, the formulation allows for delivery of a compound such as an oligonucleotide to a neural cell.

### II. METHODS AND USES

[0280] Disclosed herein, in some embodiments, are methods of administering a composition described herein to a subject. Some embodiments relate to use a composition described herein, such as administering the composition to a subject.

[0281] Some embodiments relate to a method of treating a disorder in a subject in need thereof. Some embodiments relate to use of a composition described herein in the method of treatment. Some embodiments include administering a composition described herein to a subject with the disorder. In some embodiments, the administration treats the disorder in the subject. In some embodiments, the composition treats the disorder in the subject.

[0282] In some embodiments, the treatment comprises prevention, inhibition, or reversion of the disorder in the subject. Some embodiments relate to use of a composition described herein in the method of preventing, inhibiting, or reversing the disorder. Some embodiments relate to a method of preventing, inhibiting, or reversing a disorder a disorder in a subject in need thereof. Some embodiments include administering a composition described herein to a subject with the disorder. In some embodiments, the administration prevents, inhibits, or reverses the disorder in the subject. In some embodiments, the composition prevents, inhibits, or reverses the disorder in the subject.

[0283] Some embodiments relate to a method of preventing a disorder a disorder in a subject in need thereof. Some embodiments relate to use of a composition described herein in the method of preventing the disorder. Some embodiments include administering a composition described herein to a subject with the disorder. In some embodiments, the administration prevents the disorder in the subject. In some embodiments, the composition prevents the disorder in the subject.

[0284] Some embodiments relate to a method of inhibiting a disorder a disorder in a subject in need thereof. Some embodiments relate to use of a composition described herein in the method of inhibiting the disorder. Some embodiments include administering a composition described herein to a subject with the disorder. In some embodiments, the administration inhibits the disorder in the subject. In some embodiments, the composition inhibits the disorder in the subject.

[0285] Some embodiments relate to a method of reversing a disorder a disorder in a subject in need thereof. Some embodiments relate to use of a composition described herein in the method of reversing the disorder. Some embodiments include administering a composition described herein to a subject with the disorder. In some embodiments, the administration reverses the disorder in the subject. In some embodiments, the composition reverses the disorder in the subject.

[0286] In some embodiments, the administration is systemic. In some embodiments, the administration is intravenous. In some embodiments, the administration is by injection. In some embodiments, the injection is subcutaneous. In some embodiments, the injection is subcutaneous. In some embodiments, the injection is intraperitoneal. In some embodiments, the injection is intramuscular. The administration may be to an eye (e.g. intravitreal). The administration may be to a neural tissue. The administration may be to a brain. The administration may be intracerebroventricular.

### A. Disorders

[0287] Some embodiments of the methods described herein include treating a disorder in a subject in need thereof. In some embodiments, the disorder is a neurological disorder. Non-limiting examples of neurological disorders include dementia, Alzheimer's disease, delirium, cognitive decline, vascular dementia, or Parkinson's disease. In some embodiments, the neurological disorder includes cognitive decline. In some embodiments, the neurological disorder includes delirium. In some embodiments, the neurological disorder includes dementia. In some embodiments, the neurological disorder includes vascular dementia. In some embodiments, the neurological disorder includes Alzheimer's disease. In some embodiments, the neurological disorder includes Parkinson's disease. The neurological disorder may include a neurodegenerative disease. The neurological disorder may be characterized by protein aggregation.

### B. Subjects

[0288] Some embodiments of the methods described herein include treatment of a subject. Non-limiting examples of subjects include vertebrates, animals, mammals, dogs, cats, cattle, rodents, mice, rats, primates, monkeys, and humans. In some embodiments, the subject is a vertebrate. In some embodiments, the subject is an animal. In some embodiments, the subject is a mammal. In some embodiments, the subject is a dog. In some embodiments, the subject is a cat. In some embodiments, the subject is a cattle. In some embodiments, the subject is a mouse. In some embodiments, the subject is a rat. In some embodiments, the subject is a primate. In some embodiments, the subject is a monkey. In some embodiments, the subject is an animal, a mammal, a dog, a cat, cattle, a rodent, a mouse, a rat, a primate, or a monkey. In some embodiments, the subject is a human.

[0289] In some embodiments, the subject is male. In some embodiments, the subject is female.

[0290] In some embodiments, the subject is an adult (e.g. at least 18 years old). In some embodiments, the subject is ≥90 years of age. In some embodiments, the subject is ≥85 years of age. In some embodiments, the subject is ≥80 years of age. In some embodiments, the subject is ≥70 years of age. In some embodiments, the subject is ≥60 years of age. In some embodiments, the subject is ≥50 years of age. In some embodiments, the subject is ≥40 years of age. In some embodiments, the subject is ≥30 years of age. In some embodiments, the subject is ≥20 years of age. In some embodiments, the subject is ≥10 years of age. In some embodiments, the subject is ≥1 years of age. In some embodiments, the subject is ≥0 years of age.

[0291] In some embodiments, the subject is ≤100 years of age. In some embodiments, the subject is ≤90 years of age. In some embodiments, the subject is ≤85 years of age. In some embodiments, the subject is ≤80 years of age. In some embodiments, the subject is ≤70 years of age. In some embodiments, the subject is ≤60 years of age. In some embodiments, the subject is ≤50 years of age. In some embodiments, the subject is ≤40 years of age. In some embodiments, the subject is ≤30 years of age. In some embodiments, the subject is ≤20 years of age. In some embodiments, the subject is ≤10 years of age. In some embodiments, the subject is ≤1 years of age.

[0292] In some embodiments, the subject is between 0 and 100 years of age. In some embodiments, the subject is between 20 and 90 years of age. In some embodiments, the subject is between 30 and 80 years of age. In some embodiments, the subject is between 40 and 75 years of age. In some embodiments, the subject is between 50 and 70 years of age. In some embodiments, the subject is between 40 and 85 years of age.

### Genotyping

[0293] Disclosed herein, in some embodiments, are systems, methods and kits for detecting one or more genotypes. In some embodiments, the genotypes described herein are detected using suitable genotyping devices (e.g., array, sequencing). In some instances, a sample is obtained from the subject or patient indirectly or directly. In some instances, the sample may be obtained by the subject. In other instances, the sample may be obtained by a healthcare professional, such as a nurse or physician. The sample may be derived from virtually any biological fluid or tissue containing genetic information, such as blood. Methods disclosed herein for detecting a genotype in a sample from a subject comprise analyzing the genetic material in the sample to detect at least one of a presence, an absence, and a quantity of a nucleic acid sequence encompassing the genotype of interest.

[0294] In some embodiments, the genotype is a genotype at risk for developing Alzheimer's disease or dementia. In some embodiments, the subject is a heterozygous carrier of APOE4. In some embodiments, the subject is a homozygous carrier of APOE4. In some embodiments, the subject is a heterozygous carrier of MTRES1 rs117058816-G (c.3+1G). In some embodiments, the subject is a homozygous carrier of MTRES1 rs117058816-G (c.3+1G).

[0295] In some embodiments, a polygenic risk score is calculated. In some embodiments, the polygenic risk score includes APOE. In some embodiments, the polygenic risk score does not include APOE. In some embodiments, the polygenic risk score includes at least 2, 3, 4, 5, 6, 7, 8, 9, 10, 11, 12, 13, 14, 15, 16, 17, 18, 19, 20, 21, 22, 23, 24, 25, 26, 27, 28, 29, 30, 31, 32, 33, 34, 35, 36, 37, 38, 39, or 40 variants. In some embodiments, the polygenic risk score includes at least about 100, 200, 300, 400, 500, 600, 700, 800, 900, 1,000, 2,000, 3,000, 4,000, 5,000, 6,000, 7,000, 8,000, 9,000, 10,000 or more variants. In some embodiments, the polygenic risk score includes at least 1000, 10,000, 100,000, 1,000,000 or more variants.

[0296] In some embodiments, the steps of calculating a polygenic risk score comprise providing a sample from a subject, optionally purifying DNA from the sample by processing the sample, assaying the optionally processed sample to detect genotypes of at least two genetic loci in the sample, processing the genotypes to produce a polygenic risk score (PRS), calculating the percentile risk of the subject by comparing the PRS to a reference population and selecting a therapy to treat a disease or disorder of the subject based on the percentile.

[0297] In some embodiments, a subject is at risk for developing Alzheimer's disease or dementia if the subject has a polygenic risk scope in the upper 50^{th} percentile, 40^{th} percentile, 30^{th} percentile, 20^{th} percentile, 10^{th} percentile, 5^{th} percentile, 4^{th} percentile, 3^{rd} percentile, 2^{nd} percentile, or 1^{st} percentile. In some embodiments, a subject is at risk for developing Alzheimer's disease or dementia if the subject has a polygenic risk score in the upper 20^{th} percentile. In some embodiments, a subject is at risk for developing Alzheimer's disease or dementia if the subject has a polygenic risk score in the upper 40^{th} percentile.

[0298] Nucleic acid-based detection techniques that may be useful for the methods herein include quantitative polymerase chain reaction (qPCR), gel electrophoresis, immunochemistry, in situ hybridization such as fluorescent in situ hybridization (FISH), cytochemistry, and next generation sequencing. In some embodiments, the methods involve TaqMan™ qPCR, which involves a nucleic acid amplification reaction with a specific primer pair, and hybridization of the amplified nucleic acids with a hydrolysable probe specific to a target nucleic acid.

[0299] In some instances, the methods involve hybridization and/or amplification assays that include, but are not limited to, Southern or Northern analyses, polymerase chain reaction analyses, and probe arrays. Non-limiting amplification reactions include, but are not limited to, qPCR, self-sustained sequence replication, transcriptional amplification system, Q-Beta Replicase, rolling circle replication, or any other nucleic acid amplification known in the art. As discussed, reference to qPCR herein includes use of TaqMan™ methods. An additional exemplary hybridization assay includes the use of nucleic acid probes conjugated or otherwise immobilized on a bead, multi-well plate, or other substrate, wherein the nucleic acid probes are configured to hybridize with a target nucleic acid sequence of a genotype provided herein. A non-limiting method is one employed in Anal Chem. 2013 Feb. 5; 85(3): 1932-9.

[0300] In some embodiments, detecting the presence or absence of a genotype comprises sequencing genetic material from the subject. Sequencing can be performed with any appropriate sequencing technology, including but not limited to single-molecule real-time (SMRT) sequencing, Polony sequencing, sequencing by ligation, reversible terminator sequencing, proton detection sequencing, ion semiconductor sequencing, nanopore sequencing, electronic sequencing, pyrosequencing, Maxam-Gilbert sequencing, chain termination (e.g., Sanger) sequencing, +S sequencing, or sequencing by synthesis. Sequencing methods also include next-generation sequencing, e.g., modern sequencing technologies such as Illumina sequencing (e.g., Solexa), Roche 454 sequencing, Ion torrent sequencing, and SOLID sequencing. In some cases, next-generation sequencing involves high-throughput sequencing methods. Additional sequencing methods available to one of skill in the art may also be employed.

[0301] In one aspect, the methods provided herein for determining the presence, absence, and/or quantity of a nucleic acid sequence from a particular genotype comprise an amplification reaction such as qPCR. In an exemplary method, genetic material is obtained from a sample of a subject, e.g., a sample of blood or serum. In certain embodiments where nucleic acids are extracted, the nucleic acids are extracted using any technique that does not interfere with subsequent analysis. In certain embodiments, this technique uses alcohol precipitation using ethanol, methanol, or isopropyl alcohol. In certain embodiments, this technique uses phenol, chloroform, or any combination thereof. In certain embodiments, this technique uses cesium chloride. In certain embodiments, this technique uses sodium, potassium or ammonium acetate or any other salt commonly used to precipitate DNA. In certain embodiments, this technique utilizes a column or resin based nucleic acid purification scheme such as those commonly sold commercially, one non-limiting example would be the GenElute Bacterial Genomic DNA Kit available from Sigma Aldrich. In certain embodiments, after extraction the nucleic acid is stored in water, Tris buffer, or Tris-EDTA buffer before subsequent analysis. In an exemplary embodiment, the nucleic acid material is extracted in water. In some cases, extraction does not comprise nucleic acid purification.

### C. Baseline Measurements

[0302] Some embodiments of the methods described herein include obtaining a baseline measurement from a subject. For example, in some embodiments, a baseline measurement is obtained from the subject prior to treating the subject. Non-limiting examples of baseline measurements include a baseline cognitive function measurement, a baseline central nervous system (CNS) amyloid plaque measurement, a baseline CNS tau accumulation measurement, a baseline cerebrospinal fluid (CSF) beta-amyloid 42 measurement, a baseline CSF tau measurement, a baseline CSF phospho-tau measurement, a baseline neurofilament light (NfL) measurement. a baseline CSF alpha-synuclein measurement, a baseline Lewy body measurement, a baseline MTRES1 protein measurement, or a baseline MTRES1 mRNA measurement.

[0303] In some embodiments, the baseline measurement is obtained directly from the subject. In some embodiments, the baseline measurement is obtained by observation, for example by observation of the subject or of the subject's tissue. In some embodiments, the baseline measurement is obtained noninvasively using an imaging device.

[0304] In some embodiments, the baseline measurement is obtained in a sample from the subject. In some embodiments, the baseline measurement is obtained in one or more histological tissue sections. In some embodiments, the baseline measurement is obtained by performing an assay such as an immunoassay, a colorimetric assay, or a fluorescence assay, on the sample obtained from the subject. In some embodiments, the baseline measurement is obtained by an immunoassay, a colorimetric assay, a fluorescence assay, or a chromatography (e.g. HPLC) assay. In some embodiments, the baseline measurement is obtained by PCR.

[0305] In some embodiments, the baseline measurement is a baseline cognitive function measurement. The baseline cognitive function measurement may be obtained directly from the subject. For example, the subject may be administered a test. The test may include a cognitive test such as the Montreal Cognitive Assessment (MoCA), Mini-Mental State Exam (MMSE), or Mini-Cog. The test may include assessment of basic cognitive functions such as memory, language, executive frontal lobe function, apraxia, visuospatial ability, behavior, mood, orientation, or attention. The baseline cognitive function measurement may include a score. The baseline cognitive function measurement may be indicative of mild cognitive impairment, or of severe cognitive impairment. The baseline cognitive function measurement may be indicative of a neurological disorder.

[0306] The baseline measurement may include a baseline. In some embodiments, the marker of neurodegeneration measurement. Examples of marker of neurodegeneration may include central nervous system (CNS) amyloid plaques, CNS tau accumulation, cerebrospinal fluid (CSF) beta-amyloid 42, CSF tau, CSF phospho-tau, CSF or plasma neurofilament light chain (NfL), Lewy bodies, or CSF alpha-synuclein. Any of these measurements may be reduced in relation to the baseline measurement. Some examples of ways to measure these may include an assay such as an immunoassay, colorimetric assay, or microscopy.

[0307] In some embodiments, the baseline measurement is a baseline amyloid plaque measurement. The baseline amyloid plaque measurement may include a central nervous system (CNS) amyloid plaque measurement. In some embodiments, the baseline amyloid plaque measurement includes a baseline concentration or amount. The baseline amyloid plaque measurement may be performed using an imaging device. The imaging device may include a positron emission tomography (PET) device. The baseline amyloid plaque measurement may be performed on a biopsy. The baseline amyloid plaque measurement may be performed using a spinal tap (for example, when the baseline amyloid plaque measurement includes a baseline cerebrospinal fluid (CSF) amyloid plaque measurement). In some embodiments, the baseline amyloid plaque measurement is obtained by an assay such as an immunoassay. The baseline beta amyloid plaque measurement may be indicative of a neurodegenerative disease such as Alzheimer's disease.

[0308] In some embodiments, the baseline measurement is a baseline beta-amyloid 42 measurement. The baseline beta-amyloid 42 measurement may include a cerebrospinal fluid (CSF) beta-amyloid 42 measurement. In some embodiments, the baseline beta-amyloid 42 measurement includes a baseline concentration or amount. The baseline beta-amyloid 42 measurement may be performed on a biopsy. The baseline beta-amyloid 42 measurement may be performed using a spinal tap (for example, when the baseline beta-amyloid 42 measurement includes a baseline CSF beta-amyloid 42 measurement). In some embodiments, the baseline beta-amyloid 42 measurement is obtained by an assay such as an immunoassay. The baseline beta-amyloid 42 measurement may be indicative of a neurodegenerative disease such as Alzheimer's disease.

[0309] In some embodiments, the baseline measurement is a baseline tau measurement. In some embodiments, the baseline tau measurement includes a baseline concentration or amount. The baseline tau measurement may be performed on a biopsy. In some embodiments, the baseline tau measurement is obtained by an assay such as an immunoassay. The baseline beta tau measurement may be indicative of a neurodegenerative disease such as Alzheimer's disease or Parkinson's disease.

[0310] In some embodiments, the baseline tau measurement is a baseline central nervous system (CNS) tau measurement. The baseline tau measurement may include a baseline total tau measurement. The baseline tau measurement may include a baseline unphosphorylated tau measurement. The baseline tau measurement may include a baseline phosphorylated tau (phospho-tau) measurement. In some embodiments, the baseline tau measurement is a baseline tau accumulation measurement. In some embodiments, the baseline tau measurement is a baseline CNS tau accumulation measurement. The baseline CNS tau accumulation measurement may be indicative of a neurodegenerative disease such as Alzheimer's disease or Parkinson's disease.

[0311] The baseline tau measurement may include a cerebrospinal fluid (CSF) tau measurement. The baseline CSF tau measurement may be performed after use of a spinal tap. The baseline CSF tau measurement may be indicative of a neurodegenerative disease such as Alzheimer's disease or Parkinson's disease.

[0312] The baseline CSF tau measurement may include a baseline CSF phospho-tau measurement. The baseline CSF phospho-tau measurement may include an amount of phospho-tau in relation to total tau or unphosphorylated tau. For example, the baseline CSF phospho-tau measurement may include a phospho-tau/tau ratio. The baseline CSF phospho-tau measurement may be indicative of a neurodegenerative disease such as Alzheimer's disease or Parkinson's disease.

[0313] In some embodiments, the baseline neurofilament light chain (NfL) measurement includes a baseline CSF or plasma NfL measurement. The baseline NfL measurement may be a baseline CSF NfL measurement. The baseline NfL measurement may be a baseline plasma NfL measurement. The NfL measurement may include a concentration or an amount. The baseline NfL measurement may be indicative of a neurodegenerative disease such as Alzheimer's disease or Parkinson's disease.

[0314] In some embodiments, the baseline measurement is a baseline alpha-synuclein measurement. The baseline alpha-synuclein measurement may include a cerebrospinal fluid (CSF) alpha-synuclein measurement. In some embodiments, the baseline alpha-synuclein measurement includes a baseline concentration or amount. The baseline alpha-synuclein measurement may be performed on a biopsy. The baseline alpha-synuclein measurement may be performed using a spinal tap (for example, when the baseline alpha-synuclein measurement includes a baseline CSF alpha-synuclein measurement). In some embodiments, the baseline alpha-synuclein measurement is obtained by an assay such as an immunoassay. The baseline alpha-synuclein measurement may be indicative of a neurodegenerative disease such as Parkinson's disease. The baseline alpha-synuclein measurement may be indicative of dementia.

[0315] In some embodiments, the baseline measurement is a baseline Lewy body measurement. The baseline Lewy body measurement may include a central nervous system (CNS) Lewy body measurement. In some embodiments, the baseline Lewy body measurement includes a baseline concentration or amount. The baseline Lewy body measurement may be performed using an imaging device. The imaging device may include a positron emission tomography (PET) device. The baseline beta Lewy body measurement may be indicative of dementia.

[0316] In some embodiments, the baseline measurement is a baseline MTRES1 protein measurement. In some embodiments, the baseline MTRES1 protein measurement comprises a baseline MTRES1 protein level. In some embodiments, the baseline MTRES1 protein level is indicated as a mass or percentage of MTRES1 protein per sample weight. In some embodiments, the baseline MTRES1 protein level is indicated as a mass or percentage of MTRES1 protein per sample volume. In some embodiments, the baseline MTRES1 protein level is indicated as a mass or percentage of MTRES1 protein per total protein within the sample. In some embodiments, the baseline MTRES1 protein measurement is a baseline CNS or CSF MTRES1 protein measurement. In some embodiments, the baseline MTRES1 protein measurement is obtained by an assay such as an immunoassay, a colorimetric assay, or a fluorescence assay.

[0317] In some embodiments, the baseline measurement is a baseline MTRES1 mRNA measurement. In some embodiments, the baseline MTRES1 mRNA measurement comprises a baseline MTRES1 mRNA level. In some embodiments, the baseline MTRES1 mRNA level is indicated as an amount or percentage of MTRES1 mRNA per sample weight. In some embodiments, the baseline MTRES1 mRNA level is indicated as an amount or percentage of MTRES1 mRNA per sample volume. In some embodiments, the baseline MTRES1 mRNA level is indicated as an amount or percentage of MTRES1 mRNA per total mRNA within the sample. In some embodiments, the baseline MTRES1 mRNA level is indicated as an amount or percentage of MTRES1 mRNA per total nucleic acids within the sample. In some embodiments, the baseline MTRES1 mRNA level is indicated relative to another mRNA level, such as an mRNA level of a housekeeping gene, within the sample. In some embodiments, the baseline MTRES1 mRNA measurement is a baseline CNS or CSF MTRES1 mRNA measurement. In some embodiments, the baseline MTRES1 mRNA measurement is obtained by an assay such as a polymerase chain reaction (PCR) assay. In some embodiments, the PCR comprises quantitative PCR (qPCR). In some embodiments, the PCR comprises reverse transcription of the MTRES1 mRNA.

[0318] Some embodiments of the methods described herein include obtaining a sample from a subject. In some embodiments, the baseline measurement is obtained in a sample obtained from the subject. In some embodiments, the sample is obtained from the subject prior to administration or treatment of the subject with a composition described herein. In some embodiments, a baseline measurement is obtained in a sample obtained from the subject prior to administering the composition to the subject.

[0319] In some embodiments, the sample comprises a fluid. In some embodiments, the sample is a fluid sample. In some embodiments, the fluid sample is a CSF sample. In some embodiments, the fluid sample includes a central nervous system (CNS) fluid sample. The CNS fluid may include cerebrospinal fluid (CSF). In some embodiments, the fluid sample includes a CSF sample. In In some embodiments, the sample is a blood, plasma, or serum sample. In some embodiments, the sample comprises blood. In some embodiments, the sample is a blood sample. In some embodiments, the sample is a whole-blood sample. In some embodiments, the blood is fractionated or centrifuged. In some embodiments, the sample comprises plasma. In some embodiments, the sample is a plasma sample. A blood sample may be a plasma sample. In some embodiments, the sample comprises serum. In some embodiments, the sample is a serum sample. A blood sample may be a serum sample.

[0320] In some embodiments, the sample comprises a tissue. In some embodiments, the sample is a tissue sample. In some embodiments, the tissue comprises central nervous system (CNS) tissue. For example, the baseline MTRES1 mRNA measurement, or the baseline MTRES1 protein measurement, may be obtained in a CNS tissue sample obtained from the patient. The CNS tissue may include brain tissue. The CNS tissue may include nerve tissue. The CNS tissue may include neurons, glia, microglia, astrocytes, or oligodendrocytes, or a combination thereof. The CNS tissue may include neurons. The CNS tissue may include glia. The CNS tissue may include microglia. The CNS tissue may include astrocytes. The CNS tissue may include oligodendrocytes.

[0321] In some embodiments, the sample includes cells. In some embodiments, the sample comprises a cell. In some embodiments, the cell comprises a CNS cell. The CNS cell may include a brain cell. The CNS cell may include a nerve cell. The CNS cell may be a neuron, glial cell, microglial cell, astrocyte, or oligodendrocyte. The CNS cell may be a neuron. The CNS cell may be a glial cell. The CNS cell may be a microglial cell. The CNS cell may be an astrocyte. The CNS cell may be an oligodendrocyte.

### D. Effects

[0322] In some embodiments, the composition or administration of the composition affects a measurement such as a cognitive function measurement, a central nervous system (CNS) amyloid plaque measurement, a CNS tau accumulation measurement, a cerebrospinal fluid (CSF) beta-amyloid 42 measurement, a CSF tau measurement, a CSF phospho-tau measurement, a NfL measurement, a CSF alpha-synuclein measurement, a Lewy body measurement, a MTRES1 protein measurement, or a MTRES1 mRNA measurement, relative to the baseline measurement.

[0323] Some embodiments of the methods described herein include obtaining the measurement from a subject. For example, the measurement may be obtained from the subject after treating the subject. In some embodiments, the measurement is obtained in a second sample (such as a fluid or tissue sample described herein) obtained from the subject after the composition is administered to the subject. In some embodiments, the measurement is an indication that the disorder has been treated.

[0324] In some embodiments, the measurement is obtained directly from the subject. In some embodiments, the measurement is obtained noninvasively using an imaging device. In some embodiments, the measurement is obtained in a second sample from the subject. In some embodiments, the measurement is obtained in one or more histological tissue sections. In some embodiments, the measurement is obtained by performing an assay on the second sample obtained from the subject. In some embodiments, the measurement is obtained by an assay, such as an assay described herein. In some embodiments, the assay is an immunoassay, a colorimetric assay, a fluorescence assay, a chromatography (e.g. HPLC) assay, or a PCR assay. In some embodiments, the measurement is obtained by an assay such as an immunoassay, a colorimetric assay, a fluorescence assay, or a chromatography (e.g. HPLC) assay. In some embodiments, the measurement is obtained by PCR. In some embodiments, the measurement is obtained by histology. In some embodiments, the measurement is obtained by observation. In some embodiments, additional measurements are made, such as in a third sample, a fourth sample, or a fifth sample.

[0325] In some embodiments, the measurement is obtained within 1 hour, within 2 hours, within 3 hours, within 4 hours, within 5 hours, within 6 hours, within 12 hours, within 18 hours, or within 24 hours after the administration of the composition. In some embodiments, the measurement is obtained within 1 day, within 2 days, within 3 days, within 4 days, within 5 days, within 6 days, or within 7 days after the administration of the composition. In some embodiments, the measurement is obtained within 1 week, within 2 weeks, within 3 weeks, within 1 month, within 2 months, within 3 months, within 6 months, within 1 year, within 2 years, within 3 years, within 4 years, or within 5 years after the administration of the composition. In some embodiments, the measurement is obtained after 1 hour, after 2 hours, after 3 hours, after 4 hours, after 5 hours, after 6 hours, after 12 hours, after 18 hours, or after 24 hours after the administration of the composition. In some embodiments, the measurement is obtained after 1 day, after 2 days, after 3 days, after 4 days, after 5 days, after 6 days, or after 7 days after the administration of the composition. In some embodiments, the measurement is obtained after 1 week, after 2 weeks, after 3 weeks, after 1 month, after 2 months, after 3 months, after 6 months, after 1 year, after 2 years, after 3 years, after 4 years, or after 5 years, following the administration of the composition.

[0326] In some embodiments, the composition reduces the measurement relative to the baseline measurement. For example, an adverse phenotype of a neurological disorder may be reduced upon administration of the composition. The neurological disorder may include dementia, Alzheimer's disease, delirium, cognitive decline, vascular dementia, or Parkinson's disease. In some embodiments, the reduction is measured in a second sample obtained from the subject after administering the composition to the subject. In some embodiments, the reduction is measured directly in the subject after administering the composition to the subject. In some embodiments, the measurement is decreased by about 2.5% or more, about 5% or more, or about 7.5% or more, relative to the baseline measurement. In some embodiments, the measurement is decreased by about 10% or more, relative to the baseline measurement. In some embodiments, the measurement is decreased by about 20% or more, about 30% or more, about 40% or more, about 50% or more, about 60% or more, about 70% or more, about 80% or more, about 90% or more, relative to the baseline measurement. In some embodiments, the measurement is decreased by no more than about 2.5%, no more than about 5%, or no more than about 7.5%, relative to the baseline measurement. In some embodiments, the measurement is decreased by no more than about 10%, relative to the baseline measurement. In some embodiments, the measurement is decreased by no more than about 20%, no more than about 30%, no more than about 40%, no more than about 50%, no more than about 60%, no more than about 70%, no more than about 80%, no more than about 90%, or no more than about 100% relative to the baseline measurement. In some embodiments, the measurement is decreased by 2.5%, 5%, 7.5%, 10%, 20%, 30%, 40%, 50%, 60%, 70%, 80%, 90%, or 100%, or by a range defined by any of the two aforementioned percentages.

[0327] In some embodiments, the composition increases the measurement relative to the baseline measurement. For example, a protective phenotype of a neurological disorder may be increased upon administration of the composition. The neurological disorder may include dementia, Alzheimer's disease, delirium, cognitive decline, vascular dementia, or Parkinson's disease. In some embodiments, the increase is measured in a second sample obtained from the subject after administering the composition to the subject. In some embodiments, the increase is measured directly in the subject after administering the composition to the subject. In some embodiments, the measurement is increased by about 2.5% or more, about 5% or more, or about 7.5% or more, relative to the baseline measurement. In some embodiments, the measurement is increased by about 10% or more, relative to the baseline measurement. In some embodiments, the measurement is increased by about 20% or more, about 30% or more, about 40% or more, about 50% or more, about 60% or more, about 70% or more, about 80% or more, about 90% or more, relative to the baseline measurement. In some embodiments, the measurement is increased by about 100% or more, increased by about 250% or more, increased by about 500% or more, increased by about 750% or more, or increased by about 1000% or more, relative to the baseline measurement. In some embodiments, the measurement is increased by no more than about 2.5%, no more than about 5%, or no more than about 7.5%, relative to the baseline measurement. In some embodiments, the measurement is increased by no more than about 10%, relative to the baseline measurement. In some embodiments, the measurement is increased by no more than about 20%, no more than about 30%, no more than about 40%, no more than about 50%, no more than about 60%, no more than about 70%, no more than about 80%, no more than about 90%, or no more than about 100% relative to the baseline measurement. In some embodiments, the measurement is increased by no more than about 100%, increased by no more than about 250%, increased by no more than about 500%, increased by no more than about 750%, or increased by no more than about 1000%, relative to the baseline measurement. In some embodiments, the measurement is increased by 2.5%, 5%, 7.5%, 10%, 20%, 30%, 40%, 50%, 60%, 70%, 80%, 90%, 100%, 250%, 500%, 750%, or 1000%, or by a range defined by any of the two aforementioned percentages.

[0328] In some embodiments, the measurement is a cognitive function measurement. The cognitive function measurement may be obtained directly from the subject. For example, the subject may be administered a test. The test may include a cognitive test such as the Montreal Cognitive Assessment (MoCA), Mini-Mental State Exam (MMSE), or Mini-Cog. The test may include assessment of basic cognitive functions such as memory, language, executive frontal lobe function, apraxia, visuospatial ability, behavior, mood, orientation, or attention. The cognitive function measurement may include a score. The cognitive function measurement may be indicative of a lack of cognitive impairment. In some embodiments, the cognitive function measurement is indicative of mild cognitive impairment, and the baseline cognitive function measurement is indicative of severe cognitive impairment. The cognitive function measurement may be indicative of a neurological disorder.

[0329] In some embodiments, the composition increases the cognitive function measurement relative to the baseline cognitive function measurement. In some embodiments, the increase is measured directly in the subject after administering the composition to the subject. In some embodiments, the cognitive function measurement is increased by about 2.5% or more, about 5% or more, or about 7.5% or more, relative to the baseline cognitive function measurement. In some embodiments, the cognitive function measurement is increased by about 10% or more, relative to the baseline cognitive function measurement. In some embodiments, the cognitive function measurement is increased by about 20% or more, about 30% or more, about 40% or more, about 50% or more, about 60% or more, about 70% or more, about 80% or more, about 90% or more, relative to the baseline cognitive function measurement. In some embodiments, the cognitive function measurement is increased by about 100% or more, increased by about 250% or more, increased by about 500% or more, increased by about 750% or more, or increased by about 1000% or more, relative to the baseline cognitive function measurement. In some embodiments, the cognitive function measurement is increased by no more than about 2.5%, no more than about 5%, or no more than about 7.5%, relative to the baseline cognitive function measurement. In some embodiments, the cognitive function measurement is increased by no more than about 10%, relative to the baseline cognitive function measurement. In some embodiments, the cognitive function measurement is increased by no more than about 20%, no more than about 30%, no more than about 40%, no more than about 50%, no more than about 60%, no more than about 70%, no more than about 80%, no more than about 90%, or no more than about 100% relative to the baseline cognitive function measurement. In some embodiments, the cognitive function measurement is increased by no more than about 100%, increased by no more than about 250%, increased by no more than about 500%, increased by no more than about 750%, or increased by no more than about 1000%, relative to the baseline cognitive function measurement. In some embodiments, the cognitive function measurement is increased by 2.5%, 5%, 7.5%, 10%, 20%, 30%, 40%, 50%, 60%, 70%, 80%, 90%, 100%, 250%, 500%, 750%, or 1000%, or by a range defined by any of the two aforementioned percentages.

[0330] In some embodiments, the measurement is an amyloid plaque measurement. The amyloid plaque measurement may include a central nervous system (CNS) amyloid plaque measurement. In some embodiments, the amyloid plaque measurement includes a concentration or amount. The amyloid plaque measurement may be performed using an imaging device. The imaging device may include a positron emission tomography (PET) device. The amyloid plaque measurement may be performed on a biopsy. The amyloid plaque measurement may be performed using a spinal tap (for example, when the amyloid plaque measurement includes a cerebrospinal fluid (CSF) amyloid plaque measurement). In some embodiments, the amyloid plaque measurement is obtained by an assay such as an immunoassay. The beta amyloid plaque measurement may be indicative of a treatment effect of the oligonucleotide on a neurodegenerative disease such as Alzheimer's disease.

[0331] In some embodiments, the composition reduces the amyloid plaque measurement relative to the baseline amyloid plaque measurement. In some embodiments, the reduction is measured in a second sample obtained from the subject after administering the composition to the subject. In some embodiments, the reduction is measured directly in the subject after administering the composition to the subject. In some embodiments, the amyloid plaque measurement is decreased by about 2.5% or more, about 5% or more, or about 7.5% or more, relative to the baseline amyloid plaque measurement. In some embodiments, the amyloid plaque measurement is decreased by about 10% or more, relative to the baseline amyloid plaque measurement. In some embodiments, the amyloid plaque measurement is decreased by about 20% or more, about 30% or more, about 40% or more, about 50% or more, about 60% or more, about 70% or more, about 80% or more, about 90% or more, relative to the baseline amyloid plaque measurement. In some embodiments, the amyloid plaque measurement is decreased by no more than about 2.5%, no more than about 5%, or no more than about 7.5%, relative to the baseline amyloid plaque measurement. In some embodiments, the amyloid plaque measurement is decreased by no more than about 10%, relative to the baseline amyloid plaque measurement. In some embodiments, the amyloid plaque measurement is decreased by no more than about 20%, no more than about 30%, no more than about 40%, no more than about 50%, no more than about 60%, no more than about 70%, no more than about 80%, no more than about 90%, or no more than about 100% relative to the baseline amyloid plaque measurement. In some embodiments, the amyloid plaque measurement is decreased by 2.5%, 5%, 7.5%, 10%, 20%, 30%, 40%, 50%, 60%, 70%, 80%, 90%, or 100%, or by a range defined by any of the two aforementioned percentages.

[0332] In some embodiments, the measurement is a beta-amyloid 42 measurement. The beta-amyloid 42 measurement may include a cerebrospinal fluid (CSF) beta-amyloid 42 measurement. In some embodiments, the beta-amyloid 42 measurement includes a concentration or amount. The beta-amyloid 42 measurement may be performed on a biopsy. The beta-amyloid 42 measurement may be performed using a spinal tap (for example, when the beta-amyloid 42 measurement includes a CSF beta-amyloid 42 measurement). In some embodiments, the beta-amyloid 42 measurement is obtained by an assay such as an immunoassay. The beta-amyloid 42 measurement may be indicative of a treatment effect of the oligonucleotide on a neurodegenerative disease such as Alzheimer's disease.

[0333] In some embodiments, the composition reduces the CSF beta-amyloid 42 measurement relative to the baseline beta-amyloid 42 measurement. In some embodiments, the reduction is measured in a second sample (for example, a CSF sample) obtained from the subject after administering the composition to the subject. In some embodiments, the CSF beta-amyloid 42 measurement is decreased by about 2.5% or more, about 5% or more, or about 7.5% or more, relative to the baseline CSF beta-amyloid 42 measurement. In some embodiments, the CSF beta-amyloid 42 measurement is decreased by about 10% or more, relative to the baseline CSF beta-amyloid 42 measurement. In some embodiments, the CSF beta-amyloid 42 measurement is decreased by about 20% or more, about 30% or more, about 40% or more, about 50% or more, about 60% or more, about 70% or more, about 80% or more, about 90% or more, relative to the baseline CSF beta-amyloid 42 measurement. In some embodiments, the CSF beta-amyloid 42 measurement is decreased by no more than about 2.5%, no more than about 5%, or no more than about 7.5%, relative to the baseline CSF beta-amyloid 42 measurement. In some embodiments, the CSF beta-amyloid 42 measurement is decreased by no more than about 10%, relative to the baseline CSF beta-amyloid 42 measurement. In some embodiments, the CSF beta-amyloid 42 measurement is decreased by no more than about 20%, no more than about 30%, no more than about 40%, no more than about 50%, no more than about 60%, no more than about 70%, no more than about 80%, no more than about 90%, or no more than about 100% relative to the baseline CSF beta-amyloid 42 measurement. In some embodiments, the CSF beta-amyloid 42 measurement is decreased by 2.5%, 5%, 7.5%, 10%, 20%, 30%, 40%, 50%, 60%, 70%, 80%, 90%, or 100%, or by a range defined by any of the two aforementioned percentages.

[0334] In some embodiments, the measurement is a tau measurement. In some embodiments, the tau measurement includes a concentration or amount. The tau measurement may be performed on a biopsy. In some embodiments, the tau measurement is obtained by an assay such as an immunoassay. The beta tau measurement may be indicative of a treatment effect of the oligonucleotide on a neurodegenerative disease such as Alzheimer's disease or Parkinson's disease.

[0335] In some embodiments, the tau measurement is a central nervous system (CNS) tau measurement. The tau measurement may include a total tau measurement. The tau measurement may include a unphosphorylated tau measurement. The tau measurement may include a phosphorylated tau (phospho-tau) measurement. In some embodiments, the tau measurement is a tau accumulation measurement. In some embodiments, the tau measurement is a CNS tau accumulation measurement. The CNS tau accumulation measurement may be indicative of a treatment effect of the oligonucleotide on a neurodegenerative disease such as Alzheimer's disease or Parkinson's disease.

[0336] In some embodiments, the composition reduces the CNS tau accumulation measurement relative to the baseline CNS tau accumulation measurement. In some embodiments, the reduction is measured in a second sample obtained from the subject after administering the composition to the subject. In some embodiments, the CNS tau accumulation measurement is decreased by about 2.5% or more, about 5% or more, or about 7.5% or more, relative to the baseline CNS tau accumulation measurement. In some embodiments, the CNS tau accumulation measurement is decreased by about 10% or more, relative to the baseline CNS tau accumulation measurement. In some embodiments, the CNS tau accumulation measurement is decreased by about 20% or more, about 30% or more, about 40% or more, about 50% or more, about 60% or more, about 70% or more, about 80% or more, about 90% or more, relative to the baseline CNS tau accumulation measurement. In some embodiments, the CNS tau accumulation measurement is decreased by no more than about 2.5%, no more than about 5%, or no more than about 7.5%, relative to the baseline CNS tau accumulation measurement. In some embodiments, the CNS tau accumulation measurement is decreased by no more than about 10%, relative to the baseline CNS tau accumulation measurement. In some embodiments, the CNS tau accumulation measurement is decreased by no more than about 20%, no more than about 30%, no more than about 40%, no more than about 50%, no more than about 60%, no more than about 70%, no more than about 80%, no more than about 90%, or no more than about 100% relative to the baseline CNS tau accumulation measurement. In some embodiments, the CNS tau accumulation measurement is decreased by 2.5%, 5%, 7.5%, 10%, 20%, 30%, 40%, 50%, 60%, 70%, 80%, 90%, or 100%, or by a range defined by any of the two aforementioned percentages.

[0337] The tau measurement may include a cerebrospinal fluid (CSF) tau measurement. The CSF tau measurement may be performed after use of a spinal tap. The CSF tau measurement may be indicative of a treatment effect of the oligonucleotide on a neurodegenerative disease such as Alzheimer's disease or Parkinson's disease.

[0338] In some embodiments, the composition reduces the CSF tau measurement relative to the baseline CSF tau measurement. In some embodiments, the reduction is measured in a second sample obtained from the subject after administering the composition to the subject. In some embodiments, the reduction is measured in a second CSF sample obtained from the subject after administering the composition to the subject. In some embodiments, the CSF tau measurement is decreased by about 2.5% or more, about 5% or more, or about 7.5% or more, relative to the baseline CSF tau measurement. In some embodiments, the CSF tau measurement is decreased by about 10% or more, relative to the baseline CSF tau measurement. In some embodiments, the CSF tau measurement is decreased by about 20% or more, about 30% or more, about 40% or more, about 50% or more, about 60% or more, about 70% or more, about 80% or more, about 90% or more, relative to the baseline CSF tau measurement. In some embodiments, the CSF tau measurement is decreased by no more than about 2.5%, no more than about 5%, or no more than about 7.5%, relative to the baseline CSF tau measurement. In some embodiments, the CSF tau measurement is decreased by no more than about 10%, relative to the baseline CSF tau measurement. In some embodiments, the CSF tau measurement is decreased by no more than about 20%, no more than about 30%, no more than about 40%, no more than about 50%, no more than about 60%, no more than about 70%, no more than about 80%, no more than about 90%, or no more than about 100% relative to the baseline CSF tau measurement. In some embodiments, the CSF tau measurement is decreased by 2.5%, 5%, 7.5%, 10%, 20%, 30%, 40%, 50%, 60%, 70%, 80%, 90%, or 100%, or by a range defined by any of the two aforementioned percentages.

[0339] The CSF tau measurement may include a CSF phospho-tau measurement. The CSF phospho-tau measurement may include an amount of phospho-tau in relation to total tau or unphosphorylated tau. For example, the CSF phospho-tau measurement may include a phospho-tau/tau ratio. The CSF phospho-tau measurement may be indicative of a treatment effect of the oligonucleotide on a neurodegenerative disease such as Alzheimer's disease or Parkinson's disease.

[0340] In some embodiments, the composition reduces the CSF phospho-tau measurement relative to the baseline CSF phospho-tau measurement. In some embodiments, the reduction is measured in a second sample obtained from the subject after administering the composition to the subject. In some embodiments, the reduction is measured in a second CSF sample obtained from the subject after administering the composition to the subject. In some embodiments, the CSF phospho-tau measurement is decreased by about 2.5% or more, about 5% or more, or about 7.5% or more, relative to the baseline CSF phospho-tau measurement. In some embodiments, the CSF phospho-tau measurement is decreased by about 10% or more, relative to the baseline CSF phospho-tau measurement. In some embodiments, the CSF phospho-tau measurement is decreased by about 20% or more, about 30% or more, about 40% or more, about 50% or more, about 60% or more, about 70% or more, about 80% or more, about 90% or more, relative to the baseline CSF phospho-tau measurement. In some embodiments, the CSF phospho-tau measurement is decreased by no more than about 2.5%, no more than about 5%, or no more than about 7.5%, relative to the baseline CSF phospho-tau measurement. In some embodiments, the CSF phospho-tau measurement is decreased by no more than about 10%, relative to the baseline CSF phospho-tau measurement. In some embodiments, the CSF phospho-tau measurement is decreased by no more than about 20%, no more than about 30%, no more than about 40%, no more than about 50%, no more than about 60%, no more than about 70%, no more than about 80%, no more than about 90%, or no more than about 100% relative to the baseline CSF phospho-tau measurement. In some embodiments, the CSF phospho-tau measurement is decreased by 2.5%, 5%, 7.5%, 10%, 20%, 30%, 40%, 50%, 60%, 70%, 80%, 90%, or 100%, or by a range defined by any of the two aforementioned percentages.

[0341] In some embodiments, the neurofilament light chain (NfL) measurement includes a CSF or plasma NfL measurement. The NfL measurement may be a CSF NfL measurement. The NfL measurement may be a plasma NfL measurement. The NfL measurement may include a concentration or an amount. The NfL measurement may be indicative of a neurodegenerative disease such as Alzheimer's disease or Parkinson's disease.

[0342] In some embodiments, the composition reduces the NfL measurement relative to the baseline NfL measurement. In some embodiments, the reduction is measured in a second sample obtained from the subject after administering the composition to the subject. In some embodiments, the NfL measurement is decreased by about 2.5% or more, about 5% or more, or about 7.5% or more, relative to the baseline NfL measurement. In some embodiments, the NfL measurement is decreased by about 10% or more, relative to the baseline NfL measurement. In some embodiments, the NfL measurement is decreased by about 20% or more, about 30% or more, about 40% or more, about 50% or more, about 60% or more, about 70% or more, about 80% or more, about 90% or more, relative to the baseline NfL measurement. In some embodiments, the NfL measurement is decreased by no more than about 2.5%, no more than about 5%, or no more than about 7.5%, relative to the baseline NfL measurement. In some embodiments, the NfL measurement is decreased by no more than about 10%, relative to the baseline NfL measurement. In some embodiments, the NfL measurement is decreased by no more than about 20%, no more than about 30%, no more than about 40%, no more than about 50%, no more than about 60%, no more than about 70%, no more than about 80%, no more than about 90%, or no more than about 100% relative to the baseline NfL measurement. In some embodiments, the NfL measurement is decreased by 2.5%, 5%, 7.5%, 10%, 20%, 30%, 40%, 50%, 60%, 70%, 80%, 90%, or 100%, or by a range defined by any of the two aforementioned percentages.

[0343] In some embodiments, the measurement is an alpha-synuclein measurement. The alpha-synuclein measurement may include a cerebrospinal fluid (CSF) alpha-synuclein measurement. In some embodiments, the alpha-synuclein measurement includes a concentration or amount. The alpha-synuclein measurement may be performed on a biopsy. The alpha-synuclein measurement may be performed using a spinal tap (for example, when the alpha-synuclein measurement includes a CSF alpha-synuclein measurement). In some embodiments, the alpha-synuclein measurement is obtained by an assay such as an immunoassay. The alpha-synuclein measurement may be indicative of a treatment effect of the oligonucleotide on a neurodegenerative disease such as Parkinson's disease. The alpha-synuclein measurement may be indicative of a treatment effect of the oligonucleotide on dementia.

[0344] In some embodiments, the composition reduces the alpha-synuclein measurement relative to the baseline alpha-synuclein measurement. In some embodiments, the reduction is measured in a second sample obtained from the subject after administering the composition to the subject. In some embodiments, the alpha-synuclein measurement is decreased by about 2.5% or more, about 5% or more, or about 7.5% or more, relative to the baseline alpha-synuclein measurement. In some embodiments, the alpha-synuclein measurement is decreased by about 10% or more, relative to the baseline alpha-synuclein measurement. In some embodiments, the alpha-synuclein measurement is decreased by about 20% or more, about 30% or more, about 40% or more, about 50% or more, about 60% or more, about 70% or more, about 80% or more, about 90% or more, relative to the baseline alpha-synuclein measurement. In some embodiments, the alpha-synuclein measurement is decreased by no more than about 2.5%, no more than about 5%, or no more than about 7.5%, relative to the baseline alpha-synuclein measurement. In some embodiments, the alpha-synuclein measurement is decreased by no more than about 10%, relative to the baseline alpha-synuclein measurement. In some embodiments, the alpha-synuclein measurement is decreased by no more than about 20%, no more than about 30%, no more than about 40%, no more than about 50%, no more than about 60%, no more than about 70%, no more than about 80%, no more than about 90%, or no more than about 100% relative to the baseline alpha-synuclein measurement. In some embodiments, the alpha-synuclein measurement is decreased by 2.5%, 5%, 7.5%, 10%, 20%, 30%, 40%, 50%, 60%, 70%, 80%, 90%, or 100%, or by a range defined by any of the two aforementioned percentages.

[0345] In some embodiments, the measurement is a Lewy body measurement. The Lewy body measurement may include a central nervous system (CNS) Lewy body measurement. In some embodiments, the Lewy body measurement includes a concentration or amount. The Lewy body measurement may be performed using an imaging device. The imaging device may include a positron emission tomography (PET) device. The beta Lewy body measurement may be indicative of a treatment effect of the oligonucleotide on dementia.

[0346] In some embodiments, the composition reduces the Lewy body measurement relative to the baseline Lewy body measurement. In some embodiments, the reduction is measured in a second sample obtained from the subject after administering the composition to the subject. In some embodiments, the reduction is measured directly in the subject after administering the composition to the subject. In some embodiments, the Lewy body measurement is decreased by about 2.5% or more, about 5% or more, or about 7.5% or more, relative to the baseline Lewy body measurement. In some embodiments, the Lewy body measurement is decreased by about 10% or more, relative to the baseline Lewy body measurement. In some embodiments, the Lewy body measurement is decreased by about 20% or more, about 30% or more, about 40% or more, about 50% or more, about 60% or more, about 70% or more, about 80% or more, about 90% or more, relative to the baseline Lewy body measurement. In some embodiments, the Lewy body measurement is decreased by no more than about 2.5%, no more than about 5%, or no more than about 7.5%, relative to the baseline Lewy body measurement. In some embodiments, the Lewy body measurement is decreased by no more than about 10%, relative to the baseline Lewy body measurement. In some embodiments, the Lewy body measurement is decreased by no more than about 20%, no more than about 30%, no more than about 40%, no more than about 50%, no more than about 60%, no more than about 70%, no more than about 80%, no more than about 90%, or no more than about 100% relative to the baseline Lewy body measurement. In some embodiments, the Lewy body measurement is decreased by 2.5%, 5%, 7.5%, 10%, 20%, 30%, 40%, 50%, 60%, 70%, 80%, 90%, or 100%, or by a range defined by any of the two aforementioned percentages.

[0347] In some embodiments, the measurement is an MTRES1 protein measurement. In some embodiments, the MTRES1 protein measurement comprises an MTRES1 protein level. In some embodiments, the MTRES1 protein level is indicated as a mass or percentage of MTRES1 protein per sample weight. In some embodiments, the MTRES1 protein level is indicated as a mass or percentage of MTRES1 protein per sample volume. In some embodiments, the MTRES1 protein level is indicated as a mass or percentage of MTRES1 protein per total protein within the sample. In some embodiments, the MTRES1 protein measurement is a CNS tissue or fluid MTRES1 protein measurement. In some embodiments, the MTRES1 protein measurement is obtained by an assay such as an immunoassay, a colorimetric assay, or a fluorescence assay.

[0348] In some embodiments, the composition reduces the MTRES1 protein measurement relative to the baseline MTRES1 protein measurement. In some embodiments, the composition reduces CNS tissue or fluid MTRES1 protein levels relative to the baseline MTRES1 protein measurement. In some embodiments, the reduced MTRES1 protein levels are measured in a second sample obtained from the subject after administering the composition to the subject. In some embodiments, the MTRES1 protein measurement is decreased by about 2.5% or more, about 5% or more, or about 7.5% or more, relative to the baseline MTRES1 protein measurement. In some embodiments, the MTRES1 protein measurement is decreased by about 10% or more, relative to the baseline MTRES1 protein measurement. In some embodiments, the MTRES1 protein measurement is decreased by about 20% or more, about 30% or more, about 40% or more, about 50% or more, about 60% or more, about 70% or more, about 80% or more, about 90% or more, or about 100%, relative to the baseline MTRES1 protein measurement. In some embodiments, the MTRES1 protein measurement is decreased by no more than about 2.5%, no more than about 5%, or no more than about 7.5%, relative to the baseline MTRES1 protein measurement. In some embodiments, the MTRES1 protein measurement is decreased by no more than about 10%, relative to the baseline MTRES1 protein measurement. In some embodiments, the MTRES1 protein measurement is decreased by no more than about 20%, no more than about 30%, no more than about 40%, no more than about 50%, no more than about 60%, no more than about 70%, no more than about 80%, no more than about 90%, or no more than about 100% relative to the baseline MTRES1 protein measurement. In some embodiments, the MTRES1 protein measurement is decreased by 2.5%, 5%, 7.5%, 19%, 20%, 30%, 40%, 50%, 60%, 70%, 80%, 90%, or 100%, or by a range defined by any of the two aforementioned percentages.

[0349] In some embodiments, the measurement is an MTRES1 mRNA measurement. In some embodiments, the MTRES1 mRNA measurement comprises an MTRES1 mRNA level. In some embodiments, the MTRES1 mRNA level is indicated as an amount or percentage of MTRES1 mRNA per sample weight. In some embodiments, the MTRES1 mRNA level is indicated as an amount or percentage of MTRES1 mRNA per sample volume. In some embodiments, the MTRES1 mRNA level is indicated as an amount or percentage of MTRES1 mRNA per total mRNA within the sample. In some embodiments, the MTRES1 mRNA level is indicated as an amount or percentage of MTRES1 mRNA per total nucleic acids within the sample. In some embodiments, the MTRES1 mRNA level is indicated relative to another mRNA level, such as an mRNA level of a housekeeping gene, within the sample. In some embodiments, the MTRES1 mRNA measurement is a CNS tissue or fluid MTRES1 mRNA measurement. In some embodiments, the MTRES1 mRNA measurement is obtained by an assay such as a PCR assay. In some embodiments, the PCR comprises qPCR. In some embodiments, the PCR comprises reverse transcription of the MTRES1 mRNA.

[0350] In some embodiments, the composition reduces the MTRES1 mRNA measurement relative to the baseline MTRES1 mRNA measurement. In some embodiments, the MTRES1 mRNA measurement is obtained in a second sample obtained from the subject after administering the composition to the subject. In some embodiments, the composition reduces MTRES1 mRNA levels relative to the baseline MTRES1 mRNA levels. In some embodiments, the reduced MTRES1 mRNA levels are measured in a second sample obtained from the subject after administering the composition to the subject. In some embodiments, the second sample is a CNS sample. In some embodiments, the MTRES1 mRNA measurement is reduced by about 2.5% or more, about 5% or more, or about 7.5% or more, relative to the baseline MTRES1 mRNA measurement. In some embodiments, the MTRES1 mRNA measurement is decreased by about 10% or more, relative to the baseline MTRES1 mRNA measurement. In some embodiments, the MTRES1 mRNA measurement is decreased by about 20% or more, about 30% or more, about 40% or more, about 50% or more, about 60% or more, about 70% or more, about 80% or more, about 90% or more, or about 100%, relative to the baseline MTRES1 mRNA measurement. In some embodiments, the MTRES1 mRNA measurement is decreased by no more than about 2.5%, no more than about 5%, or no more than about 7.5%, relative to the baseline MTRES1 mRNA measurement. In some embodiments, the MTRES1 mRNA measurement is decreased by no more than about 10%, relative to the baseline MTRES1 mRNA measurement. In some embodiments, the MTRES1 mRNA measurement is decreased by no more than about 20%, no more than about 30%, no more than about 40%, no more than about 50%, no more than about 60%, no more than about 70%, no more than about 80%, no more than about 90%, or no more than about 100%, relative to the baseline MTRES1 mRNA measurement. In some embodiments, the MTRES1 mRNA measurement is decreased by 2.5%, 5%, 7.5%, 10%, 20%, 30%, 40%, 50%, 60%, 70%, 80%, 90%, or 100% or by a range defined by any of the two aforementioned percentages.

### III. EMBODIMENTS

[0351] Also described herein are the following embodiments:
[0352] 1. A composition comprising an oligonucleotide that targets MTRES1 and when administered to a subject in an effective amount decreases central nervous system (CNS) MTRES1.
[0353] 2. The composition of embodiment 1, wherein the CNS MTRES1 decreased by about 10% or more, as compared to prior to administration.
[0354] 3. A composition comprising an oligonucleotide that targets MTRES1 and when administered to a subject in an effective amount increases cognitive function or slows cognitive decline.
[0355] 4. The composition of embodiment 3, wherein the cognitive function is increased by about 10% or more, as compared to prior to administration.
[0356] 5. The composition of embodiment 3, wherein the cognitive decline is slowed by about 10% or more, as compared to prior to administration.
[0357] 6. A composition comprising an oligonucleotide that targets MTRES1 and when administered to a subject in an effective amount decreases a marker of neurodegeneration.
[0358] 7. The composition of embodiment 6, wherein the marker of neurodegeneration comprises a central nervous system (CNS) or cerebrospinal fluid (CSF) marker of neurodegeneration.
[0359] 8. The composition of embodiment 6, wherein the marker of neurodegeneration comprises a measurement of central nervous system (CNS) amyloid plaques, CNS tau accumulation, cerebrospinal fluid (CSF) beta-amyloid 42, CSF tau, CSF phospho-tau, CSF or plasma neurofilament light chain (NfL), Lewy bodies, or CSF alpha-synuclein.
[0360] 9. The composition of any one of embodiments 6-8, wherein the marker of neurodegeneration is decreased by about 10% or more, as compared to prior to administration.
[0361] 10. The composition of any one of embodiments 1, 3, or 6, wherein the oligonucleotide comprises a modified internucleoside linkage.
[0362] 11. The composition of embodiment 10, wherein the modified internucleoside linkage comprises alkylphosphonate, phosphorothioate, methylphosphonate, phosphorodithioate, alkylphosphonothioate, phosphoramidate, carbamate, carbonate, phosphate triester, acetamidate, or carboxymethyl ester, or a combination thereof.
[0363] 12. The composition of embodiment 10, wherein the modified internucleoside linkage comprises one or more phosphorothioate linkages.
[0364] 13. The composition of any one of embodiments 1, 3, or 6, wherein the oligonucleotide comprises 1, 2, 3, 4, 5, 6, 7, 8, 9, 10, 11, 12, 13, 14, 15, 16, 17, 18, 19, or 20 modified internucleoside linkages.
[0365] 14. The composition of any one of embodiments 1, 3, or 6, wherein the oligonucleotide comprises a modified nucleoside.
[0366] 15. The composition of embodiment 14, wherein the modified nucleoside comprises a locked nucleic acid (LNA), hexitol nucleic acid (HNA), cyclohexene nucleic acid (CeNA), 2′-O-methoxyethyl, 2′-O-alkyl, 2′-O-allyl, 2′-O-allyl, 2′-fluoro, or 2′-deoxy, or a combination thereof.
[0367] 16. The composition of embodiment 14, wherein the modified nucleoside comprises an LNA.
[0368] 17. The composition of embodiment 14, wherein the modified nucleoside comprises a 2′,4′ constrained ethyl nucleic acid.
[0369] 18. The composition of embodiment 14, wherein the modified nucleoside comprises a 2′-O-methyl nucleoside, 2′-deoxyfluoro nucleoside, 2′-O—N-methylacetamido (2′-O-NMA) nucleoside, a 2′-O-dimethylaminoethoxyethyl(2′-O-DMAEOE) nucleoside, 2′-O-aminopropyl(2′-O-AP) nucleoside, or 2′-ara-F, or a combination thereof.
[0370] 19. The composition of embodiment 14, wherein the modified nucleoside comprises one or more 2′fluoro modified nucleosides.
[0371] 20. The composition of embodiment 14, wherein the modified nucleoside comprises a 2′-O-alkyl modified nucleoside.
[0372] 21. The composition of any one of embodiments 1, 3, or 6, wherein the oligonucleotide comprises 1, 2, 3, 4, 5, 6, 7, 8, 9, 10, 11, 12, 13, 14, 15, 16, 17, 18, 19, 20, or 21 modified nucleosides.
[0373] 22. The composition of embodiment any one of embodiments 1, 3, or 6, wherein the oligonucleotide comprises a lipophilic moiety attached at a 3′ or 5′ terminus of the oligonucleotide.
[0374] 23. The composition of embodiment 22, wherein the lipophilic moiety comprises cholesterol, retinoic acid, cholic acid, adamantane acetic acid, 1-pyrene butyric acid, dihydrotestosterone, 1,3-bis-O(hexadecyl)glycerol, geranyloxyhexyanol, hexadecylglycerol, borneol, menthol, 1,3-propanediol, heptadecyl, palmitic acid, myristic acid, O3-(oleoyl) lithocholic acid, O3-(oleoyl) cholenic acid, ibuprofen, naproxen, dimethoxytrityl, or phenoxazine.
[0375] 24. The composition of embodiment 22, wherein the lipophilic moiety comprises a C4-C₃₀ hydrocarbon chain.
[0376] 25. The composition of embodiment 22, wherein the lipophilic moiety comprises a lipid.
[0377] 26. The composition of embodiment 25, wherein the lipid comprises myristoyl, palmitoyl, stearoyl, lithocholoyl, docosanoyl, docosahexaenoyl, myristyl, palmityl stearyl, or α-tocopherol, or a combination thereof.
[0378] 27. The composition of embodiment any one of embodiments 1, 3, or 6, wherein the oligonucleotide comprises a small interfering RNA (siRNA) comprising a sense strand and an antisense strand.
[0379] 28. The composition of embodiment 27, wherein the sense strand is 12-30 nucleosides in length.
[0380] 29. The composition of embodiment 27, wherein the antisense strand is 12-30 nucleosides in length.
[0381] 30. A composition comprising an oligonucleotide that inhibits the expression of MTRES1, wherein the oligonucleotide comprises an siRNA comprising a sense strand and an antisense strand, each strand is independently about 12-30 nucleosides in length, and at least one of the sense strand and the antisense strand comprises a nucleoside sequence comprising about 12-30 contiguous nucleosides of SEQ ID NO: 2443.
[0382] 31. The composition of embodiment 27, wherein any one of the following is true with regard to the sense strand:
   [0383] all purines comprise 2′-fluoro modified purines, and all pyrimidines comprise a mixture of 2′-fluoro and 2′-methyl modified pyrimidines;
   [0384] all purines comprise 2′-methyl modified purines, and all pyrimidines comprise a mixture of 2′-fluoro and 2′-methyl modified pyrimidines;
   [0385] all purines comprise 2′-fluoro modified purines, and all pyrimidines comprise 2′-methyl modified pyrimidines;
   [0386] all pyrimidines comprise 2′-fluoro modified pyrimidines, and all purines comprise a mixture of 2′-fluoro and 2′-methyl modified purines;
   [0387] all pyrimidines comprise 2′-methyl modified pyrimidines, and all purines comprise a mixture of 2′-fluoro and 2′-methyl modified purines; or all pyrimidines comprise 2′-fluoro modified pyrimidines, and all purines comprise 2′-methyl modified purines.
[0388] 32. The composition of embodiment 27, wherein any one of the following is true with regard to the antisense strand:
   [0389] all purines comprise 2′-fluoro modified purines, and all pyrimidines comprise a mixture of 2′-fluoro and 2′-methyl modified pyrimidines;
   [0390] all purines comprise 2′-methyl modified purines, and all pyrimidines comprise a mixture of 2′-fluoro and 2′-methyl modified pyrimidines;
   [0391] all purines comprise 2′-methyl modified purines, and all pyrimidines comprise 2′-fluoro modified pyrimidines;
   [0392] all pyrimidines comprise 2′-fluoro modified pyrimidines, and all purines comprise a mixture of 2′-fluoro and 2′-methyl modified purines;
   [0393] all pyrimidines comprise 2′-methyl modified pyrimidines, and all purines comprise a mixture of 2′-fluoro and 2′-methyl modified purines; or all pyrimidines comprise 2′-methyl modified pyrimidines, and all purines comprise 2′-fluoro modified purines.
[0394] 33. The composition of embodiment 27, wherein the oligonucleotide comprises a phosphate at the 5′ end of the antisense strand.
[0395] 34. The composition of embodiment 27, wherein the oligonucleotide comprises a phosphate mimic at the 5′ end of the antisense strand.
[0396] 35. The composition of embodiment 34, wherein the phosphate mimic comprises a 5′-vinyl phosphonate (VP).
[0397] 36. The composition of any one of embodiments 1, 3, or 6, wherein the oligonucleotide comprises an antisense oligonucleotide (ASO).
[0398] 37. The composition of embodiment 36, wherein the ASO is 12-30 nucleosides in length.
[0399] 38. A composition comprising an oligonucleotide that inhibits the expression of MTRES1, wherein the oligonucleotide comprises an ASO about 12-30 nucleosides in length and a nucleoside sequence complementary to about 12-30 contiguous nucleosides of SEQ ID NO: 2443.
[0400] 39. The composition of any one of embodiments 1, 3, 6, or 38, further comprising a pharmaceutically acceptable carrier.
[0401] 40. A method of treating a subject having a neurological disorder, comprising administering an effective amount of the composition of embodiment 39 to the subject.
[0402] 41. The method of embodiment 40, wherein the neurological disorder comprises dementia, Alzheimer's disease, delirium, cognitive decline, vascular dementia, or Parkinson's disease.

### IV. DEFINITIONS

[0403] Unless defined otherwise, all terms of art, notations and other technical and scientific terms or terminology used herein are intended to have the same meaning as is commonly understood by one of ordinary skill in the art to which the claimed subject matter pertains. In some cases, terms with commonly understood meanings are defined herein for clarity and/or for ready reference, and the inclusion of such definitions herein should not necessarily be construed to represent a substantial difference over what is generally understood in the art.

[0404] Throughout this application, various embodiments may be presented in a range format. It should be understood that the description in range format is merely for convenience and brevity and should not be construed as an inflexible limitation on the scope of the disclosure. Accordingly, the description of a range should be considered to have specifically disclosed all the possible subranges as well as individual numerical values within that range. For example, description of a range such as from 1 to 6 should be considered to have specifically disclosed subranges such as from 1 to 3, from 1 to 4, from 1 to 5, from 2 to 4, from 2 to 6, from 3 to 6 etc., as well as individual numbers within that range, for example, 1, 2, 3, 4, 5, and 6. This applies regardless of the breadth of the range.

[0405] As used in the specification and claims, the singular forms “a”, “an” and “the” include plural references unless the context clearly dictates otherwise. For example, the term “a sample” includes a plurality of samples, including mixtures thereof.

[0406] The terms “determining,” “measuring,” “evaluating,” “assessing,” “assaying,” and “analyzing” are often used interchangeably herein to refer to forms of measurement. The terms include determining if an element is present or not (for example, detection). These terms can include quantitative, qualitative or quantitative and qualitative determinations. Assessing can be relative or absolute. “Detecting the presence of” can include determining the amount of something present in addition to determining whether it is present or absent depending on the context.

[0407] The terms “subject,” and “patient” may be used interchangeably herein. A “subject” can be a biological entity containing expressed genetic materials. The biological entity can be a plant, animal, or microorganism, including, for example, bacteria, viruses, fungi, and protozoa. The subject can be a mammal. The mammal can be a human. The subject may be diagnosed or suspected of being at high risk for a disease. In some cases, the subject is not necessarily diagnosed or suspected of being at high risk for the disease.

[0408] As used herein, the term “about” a number refers to that number plus or minus 10% of that number. The term “about” a range refers to that range minus 10% of its lowest value and plus 10% of its greatest value.

[0409] As used herein, the terms “treatment” or “treating” are used in reference to a pharmaceutical or other intervention regimen for obtaining beneficial or desired results in the recipient. Beneficial or desired results include but are not limited to a therapeutic benefit and/or a prophylactic benefit. A therapeutic benefit may refer to eradication or amelioration of symptoms or of an underlying disorder being treated. Also, a therapeutic benefit can be achieved with the eradication or amelioration of one or more of the physiological symptoms associated with the underlying disorder such that an improvement is observed in the subject, notwithstanding that the subject may still be afflicted with the underlying disorder. A prophylactic effect includes delaying, preventing, or eliminating the appearance of a disease or condition, delaying or eliminating the onset of symptoms of a disease or condition, slowing, halting, or reversing the progression of a disease or condition, or any combination thereof. For prophylactic benefit, a subject at risk of developing a particular disease, or to a subject reporting one or more of the physiological symptoms of a disease may undergo treatment, even though a diagnosis of this disease may not have been made.

[0410] The term “C_{x-y}” or “Cₓ-C_{y}” when used in conjunction with a chemical moiety, such as alkyl, alkenyl, or alkynyl is meant to include groups that contain from x to y carbons in the chain. For example, the term “C₁-6alkyl” refers to substituted or unsubstituted saturated hydrocarbon groups, including straight-chain alkyl and branched-chain alkyl groups that contain from 1 to 6 carbons.

[0411] The terms “C_{x-y}alkenyl” and “C_{x-y}alkynyl” refer to substituted or unsubstituted unsaturated aliphatic groups analogous in length and possible substitution to the alkyls described above, but that contain at least one double or triple bond, respectively.

[0412] The term “carbocycle” as used herein refers to a saturated, unsaturated or aromatic ring in which each atom of the ring is carbon. Carbocycle includes 3- to 10-membered monocyclic rings, 5- to 12-membered bicyclic rings, 5- to 12-membered spiro bicycles, and 5- to 12-membered bridged rings. Each ring of a bicyclic carbocycle may be selected from saturated, unsaturated, and aromatic rings. In an exemplary embodiment, an aromatic ring, e.g., phenyl, may be fused to a saturated or unsaturated ring, e.g., cyclohexane, cyclopentane, or cyclohexene. A bicyclic carbocycle includes any combination of saturated, unsaturated and aromatic bicyclic rings, as valence permits. A bicyclic carbocycle further includes spiro bicyclic rings such as spiropentane. A bicyclic carbocycle includes any combination of ring sizes such as 3-3 spiro ring systems, 4-4 spiro ring systems, 4-5 fused ring systems, 5-5 fused ring systems, 5-6 fused ring systems, 6-6 fused ring systems, 5-7 fused ring systems, 6-7 fused ring systems, 5-8 fused ring systems, and 6-8 fused ring systems. Exemplary carbocycles include cyclopentyl, cyclohexyl, cyclohexenyl, adamantyl, phenyl, indanyl, naphthyl, and bicyclo[1.1.1]pentanyl.

[0413] The term “aryl” refers to an aromatic monocyclic or aromatic multicyclic hydrocarbon ring system. The aromatic monocyclic or aromatic multicyclic hydrocarbon ring system contains only hydrogen and carbon and from five to eighteen carbon atoms, where at least one of the rings in the ring system is aromatic, i.e., it contains a cyclic, delocalized (4n+2) π-electron system in accordance with the Hückel theory. The ring system from which aryl groups are derived include, but are not limited to, groups such as benzene, fluorene, indane, indene, tetralin and naphthalene.

[0414] The term “cycloalkyl” refers to a saturated ring in which each atom of the ring is carbon. Cycloalkyl may include monocyclic and polycyclic rings such as 3- to 10-membered monocyclic rings, 5- to 12-membered bicyclic rings, 5- to 12-membered spiro bicycles, and 5- to 12-membered bridged rings. In certain embodiments, a cycloalkyl comprises three to ten carbon atoms. In other embodiments, a cycloalkyl comprises five to seven carbon atoms. The cycloalkyl may be attached to the rest of the molecule by a single bond. Examples of monocyclic cycloalkyls include, e.g., cyclopropyl, cyclobutyl, cyclopentyl, cyclohexyl, cycloheptyl, and cyclooctyl. Polycyclic cycloalkyl radicals include, for example, adamantyl, spiropentane, norbornyl (i.e., bicyclo[2.2.1]heptanyl), decalinyl, 7,7 dimethyl bicyclo[2.2.1]heptanyl, bicyclo[1.1.1]pentanyl, and the like.

[0415] The term “cycloalkenyl” refers to a saturated ring in which each atom of the ring is carbon and there is at least one double bond between two ring carbons. Cycloalkenyl may include monocyclic and polycyclic rings such as 3- to 10-membered monocyclic rings, 6- to 12-membered bicyclic rings, and 5- to 12-membered bridged rings. In other embodiments, a cycloalkenyl comprises five to seven carbon atoms. The cycloalkenyl may be attached to the rest of the molecule by a single bond. Examples of monocyclic cycloalkenyls include, e.g., cyclopentenyl, cyclohexenyl, cycloheptenyl, and cyclooctenyl.

[0416] The term “halo” or, alternatively, “halogen” or “halide,” means fluoro, chloro, bromo or iodo. In some embodiments, halo is fluoro, chloro, or bromo.

[0417] The term “haloalkyl” refers to an alkyl radical, as defined above, that is substituted by one or more halo radicals, for example, trifluoromethyl, dichloromethyl, bromomethyl, 2,2,2-trifluoroethyl, 1-chloromethyl-2-fluoroethyl, and the like. In some embodiments, the alkyl part of the haloalkyl radical is optionally further substituted as described herein.

[0418] The term “heterocycle” as used herein refers to a saturated, unsaturated or aromatic ring comprising one or more heteroatoms. Exemplary heteroatoms include N, O, Si, P, B, and S atoms. Heterocycles include 3- to 10-membered monocyclic rings, 6- to 12-membered bicyclic rings, 5- to 12-membered spiro bicycles, and 5- to 12-membered bridged rings. A bicyclic heterocycle includes any combination of saturated, unsaturated and aromatic bicyclic rings, as valence permits. In an exemplary embodiment, an aromatic ring, e.g., pyridyl, may be fused to a saturated or unsaturated ring, e.g., cyclohexane, cyclopentane, morpholine, piperidine or cyclohexene. A bicyclic heterocycle includes any combination of ring sizes such as 4-5 fused ring systems, 5-5 fused ring systems, 5-6 fused ring systems, 6-6 fused ring systems, 5-7 fused ring systems, 6-7 fused ring systems, 5-8 fused ring systems, and 6-8 fused ring systems. A bicyclic heterocycle further includes spiro bicyclic rings, e.g., 5 to 12-membered spiro bicycles, such as 2-oxa-6-azaspiro[3.3]heptane.

[0419] The term “heteroaryl” refers to a radical derived from a 5 to 18 membered aromatic ring radical that comprises two to seventeen carbon atoms and from one to six heteroatoms selected from nitrogen, oxygen and sulfur. As used herein, the heteroaryl radical is a monocyclic, bicyclic, tricyclic or tetracyclic ring system, wherein at least one of the rings in the ring system is aromatic, i.e., it contains a cyclic, delocalized (4n+2) π-electron system in accordance with the Hückel theory. Heteroaryl includes fused or bridged ring systems. The heteroatom(s) in the heteroaryl radical is optionally oxidized. One or more nitrogen atoms, if present, are optionally quaternized. The heteroaryl is attached to the rest of the molecule through any atom of the ring(s). Examples of heteroaryls include, but are not limited to, azepinyl, acridinyl, benzimidazolyl, benzindolyl, 1,3-benzodioxolyl, benzofuranyl, benzoxazolyl, benzo[d]thiazolyl, benzothiadiazolyl, benzo[b][1,4]dioxepinyl, benzo[b][1,4]oxazinyl, 1,4-benzodioxanyl, benzonaphthofuranyl, benzoxazolyl, benzodioxolyl, benzodioxinyl, benzopyranyl, benzopyranonyl, benzofuranyl, benzofuranonyl, benzothienyl (benzothiophenyl), benzothieno[3,2-d]pyrimidinyl, benzotriazolyl, benzo[4,6]imidazo[1,2-a]pyridinyl, carbazolyl, cinnolinyl, cyclopenta[d]pyrimidinyl, 6,7-dihydro-5H-cyclopenta[4,5]thieno[2,3-d]pyrimidinyl, 5,6-dihydrobenzo[h]quinazolinyl, 5,6-dihydrobenzo[h]cinnolinyl, 6,7-dihydro-5H-benzo[6,7] cyclohepta[1,2-c]pyridazinyl, dibenzofuranyl, dibenzothiophenyl, furanyl, furanonyl, furo[3,2-c]pyridinyl, 5,6,7,8,9,10-hexahydrocycloocta[d]pyrimidinyl, 5,6,7,8,9,10-hexahydrocycloocta[d]pyridazinyl, 5,6,7,8,9,10-hexahydrocycloocta[d]pyridinyl, isothiazolyl, imidazolyl, indazolyl, indolyl, indazolyl, isoindolyl, indolinyl, isoindolinyl, isoquinolyl, indolizinyl, isoxazolyl, 5,8-methano 5,6,7,8-tetrahydroquinazolinyl, naphthyridinyl, 1,6-naphthyridinonyl, oxadiazolyl, 2-oxoazepinyl, oxazolyl, oxiranyl, 5,6,6a, 7,8,9,10,10a-octahydrobenzo[h]quinazolinyl, 1-phenyl-1H-pyrrolyl, phenazinyl, phenothiazinyl, phenoxazinyl, phthalazinyl, pteridinyl, purinyl, pyrrolyl, pyrazolyl, pyrazolo[3,4-d]pyrimidinyl, pyridinyl, pyrido[3,2-d]pyrimidinyl, pyrido[3,4-d]pyrimidinyl, pyrazinyl, pyrimidinyl, pyridazinyl, pyrrolyl, quinazolinyl, quinoxalinyl, quinolinyl, isoquinolinyl, tetrahydroquinolinyl, 5,6,7,8-tetrahydroquinazolinyl, 5,6,7,8-tetrahydrobenzo[4,5]thieno[2,3-d]pyrimidinyl, 6,7,8,9-tetrahydro-5H-cyclohepta[4,5]thieno[2,3-d]pyrimidinyl, 5,6,7,8-tetrahydropyrido[4,5-c]pyridazinyl, thiazolyl, thiadiazolyl, triazolyl, tetrazolyl, triazinyl, thieno[2,3-d]pyrimidinyl, thieno[3,2-d]pyrimidinyl, thieno[2,3-c]pyridinyl, and thiophenyl (i.e. thienyl).

[0420] The term “heterocycloalkyl” refers to a saturated ring with carbon atoms and at least one heteroatom. Exemplary heteroatoms include N, O, Si, P, B, and S atoms. Heterocycloalkyl may include monocyclic and polycyclic rings such as 3- to 10-membered monocyclic rings, 6- to 12-membered bicyclic rings, 5- to 12-membered spiro bicycles, and 5- to 12-membered bridged rings. The heteroatoms in the heterocycloalkyl radical are optionally oxidized. One or more nitrogen atoms, if present, are optionally quaternized. The heterocycloalkyl is attached to the rest of the molecule through any atom of the heterocycloalkyl, valence permitting, such as any carbon or nitrogen atoms of the heterocycloalkyl. Examples of heterocycloalkyl radicals include, but are not limited to, dioxolanyl, thienyl[1,3]dithianyl, decahydroisoquinolyl, imidazolinyl, imidazolidinyl, isothiazolidinyl, isoxazolidinyl, morpholinyl, octahydroindolyl, octahydroisoindolyl, 2-oxopiperazinyl, 2-oxopiperidinyl, 2-oxopyrrolidinyl, oxazolidinyl, piperidinyl, piperazinyl, 4-piperidonyl, pyrrolidinyl, pyrazolidinyl, quinuclidinyl, thiazolidinyl, tetrahydrofuryl, trithianyl, tetrahydropyranyl, thiomorpholinyl, thiamorpholinyl, 1-oxo-thiomorpholinyl, 2-oxa-6-azaspiro[3.3]heptane, and 1,1-dioxo-thiomorpholinyl.

[0421] The term “heterocycloalkenyl” refers to an unsaturated ring with carbon atoms and at least one heteroatom and there is at least one double bond between two ring carbons. Heterocycloalkenyl does not include heteroaryl rings. Exemplary heteroatoms include N, O, Si, P, B, and S atoms. Heterocycloalkenyl may include monocyclic and polycyclic rings such as 3- to 10-membered monocyclic rings, 6- to 12-membered bicyclic rings, and 5- to 12-membered bridged rings. In other embodiments, a heterocycloalkenyl comprises five to seven ring atoms. The heterocycloalkenyl may be attached to the rest of the molecule by a single bond. Examples of monocyclic cycloalkenyls include, e.g., pyrroline (dihydropyrrole), pyrazoline (dihydropyrazole), imidazoline (dihydroimidazole), triazoline (dihydrotriazole), dihydrofuran, dihydrothiophene, oxazoline (dihydrooxazole), isoxazoline (dihydroisoxazole), thiazoline (dihydrothiazole), isothiazoline (dihydroisothiazole), oxadiazoline (dihydrooxadiazole), thiadiazoline (dihydrothiadiazole), dihydropyridine, tetrahydropyridine, dihydropyridazine, tetrahydropyridazine, dihydropyrimidine, tetrahydropyrimidine, dihydropyrazine, tetrahydropyrazine, pyran, dihydropyran, thiopyran, dihydrothiopyran, dioxine, dihydrodioxine, oxazine, dihydrooxazine, thiazine, and dihydrothiazine.

[0422] The term “substituted” refers to moieties having substituents replacing a hydrogen on one or more carbons or substitutable heteroatoms, e.g., an NH or NH₂ of a compound. It will be understood that “substitution” or “substituted with” includes the implicit proviso that such substitution is in accordance with permitted valence of the substituted atom and the substituent, and that the substitution results in a stable compound, i.e., a compound which does not spontaneously undergo transformation such as by rearrangement, cyclization, elimination, etc. In certain embodiments, substituted refers to moieties having substituents replacing two hydrogen atoms on the same carbon atom, such as substituting the two hydrogen atoms on a single carbon with an oxo, imino or thioxo group. As used herein, the term “substituted” is contemplated to include all permissible substituents of organic compounds. In a broad aspect, the permissible substituents include acyclic and cyclic, branched and unbranched, carbocyclic and heterocyclic, aromatic and non-aromatic substituents of organic compounds. The permissible substituents can be one or more and the same or different for appropriate organic compounds.

[0423] In some embodiments, substituents may include any substituents described herein, for example: halogen, hydroxy, oxo (═O), thioxo (═S), cyano (—CN), nitro (—NO2), imino (═N—H), oximo (═N—OH), hydrazino (=N—NH₂), —R^{b}OR^{a}, —R^{b}OC(O)R^{a}, —R^{b}OC(O) OR^{a}, —R^{b}OC(O)N(R^{a})₂, —R^{b}N(R^{a})₂, —R^{b}C(O)R^{a}, —R^{b}C(O)OR^{a}, —R^{b}C(O)N(R^{a})₂, —R^{b}OR^{b}C(O)N(R^{a})₂, —R^{b}N(R^{a})C(O)OR^{a}, —R^{b}N(R^{a}) C(O)R^{a}, —R^{b}N(R^{a})S(O)ₜR^{a} (where t is 1 or 2), —R^{b}S(O)ₜR^{a} (where t is 1 or 2), —R^{b}S(O), OR^{a} (where t is 1 or 2), and —R^{b}S(O)ₜN(R^{a})₂ (where t is 1 or 2); and alkyl, alkenyl, alkynyl, aryl, aralkyl, aralkenyl, aralkynyl, cycloalkyl, cycloalkylalkyl, heterocycloalkyl, heterocycloalkylalkyl, heteroaryl, and heteroarylalkyl, any of which may be optionally substituted by alkyl, alkenyl, alkynyl, halogen, haloalkyl, haloalkenyl, haloalkynyl, oxo (═O), thioxo (═S), cyano (—CN), nitro (—NO2), imino (═N—H), oximo (═N—OH), hydrazine (=N—NH₂), —R^{b}OR^{a}, —R^{b}OC(O)R^{a}, —R^{b}OC(O) OR^{a}, —R^{b}O^{c}(O)N(R^{a})₂, —R^{b}N(R^{a})₂, —R^{b}C(O)R^{a}, —R^{b}C(O)OR^{a}, —R^{b}C(O)N(R^{a})₂, —R^{b}OR^{c}(O)N(R^{a})₂, —R^{b}N(R^{a})C(O)OR^{a}, —R^{b}N(R^{a}) C(O)R^{a}, —R^{b}N(R^{a})S(O)ₜR^{a} (where t is 1 or 2), —R^{b}S(O)ₜR^{a} (where t is 1 or 2), —R^{b}S(O)ₜOR^{a} (where t is 1 or 2) and —R^{b}S(O)ₜN(R^{a})₂ (where t is 1 or 2); wherein each R^{a} is independently selected from hydrogen, alkyl, cycloalkyl, cycloalkylalkyl, aryl, aralkyl, heterocycloalkyl, heterocycloalkylalkyl, heteroaryl, or heteroarylalkyl, wherein each R^{a}, valence permitting, may be optionally substituted with alkyl, alkenyl, alkynyl, halogen, haloalkyl, haloalkenyl, haloalkynyl, oxo (═O), thioxo (═S), cyano (—CN), nitro (—NO2), imino (═N—H), oximo (═N—OH), hydrazine (=N—NH₂), —R^{b}OR^{a}, —R^{b}O^{c}(O)R^{a}, —R^{b}OC(O) OR^{a}, —R^{b}OC(O)N(R^{a})₂, —R^{b}N(R^{a})₂, —R^{b}C(O)R^{a}, —R^{b}C(O)OR^{a}, —R^{b}C(O)N(R^{a})₂, —R^{b}OR^{c}(O)N(R^{a})₂, —R^{b}N(R^{a})C(O)OR^{a}, —R^{b}N(R^{a}) C(O)R^{a}, —R^{b}N(R^{a})S(O)ₜR^{a} (where t is 1 or 2), —R^{b}S(O)ₜR^{a} (where t is 1 or 2), —R^{b}S(O) OR^{a} (where t is 1 or 2) and —R^{b}S(O)ₜN(R^{a})₂ (where t is 1 or 2); and wherein each R^{b} is independently selected from a direct bond or a straight or branched alkylene, alkenylene, or alkynylene chain, and each R^{c} is a straight or branched alkylene, alkenylene or alkynylene chain.

[0424] Double bonds to oxygen atoms, such as oxo groups, are represented herein as both “=O” and “(O)”. Double bonds to nitrogen atoms are represented as both “=NR” and “(NR)”. Double bonds to sulfur atoms are represented as both “=S” and “(S)”.

[0425] In some embodiments, a “derivative” polypeptide or peptide is one that is modified, for example, by glycosylation, pegylation, phosphorylation, sulfation, reduction/alkylation, acylation, chemical coupling, or mild formalin treatment. A derivative may also be modified to contain a detectable label, either directly or indirectly, including, but not limited to, a radioisotope, fluorescent, and enzyme label.

[0426] Some embodiments refer to nucleic acid sequence information. It is contemplated that in some embodiments, thymine (T) may be interchanged with uracil (U), or vice versa. For example, some sequences in the sequence listing may recite Ts, but these may be replaced with Us in some embodiments. In some oligonucleotides with nucleic acid sequences that include uracil, the uracil may be replaced with thymine. Similarly, in some oligonucleotides with nucleic acid sequences that include thymine, the thymine may be replaced with uracil. In some embodiments, an oligonucleotide such as an siRNA comprises or consists of RNA. In some embodiments, the oligonucleotide may comprise or consist of DNA. For example, an ASO may include DNA.

[0427] Some aspects include sequences with nucleotide modifications or modified internucleoside linkages. Generally, and unless otherwise specified, Nf (e.g. Af, Cf, Gf, Tf, or Uf) refers to a 2′-fluoro-modified nucleoside, dN (e.g. dA, dC, dG, dT, or dU) refers to a 2′-deoxy nucleoside, n (e.g. a, c, g, t, or u) refers to a 2′-O-methyl modified nucleoside, and “s” refers to a phosphorothioate linkage.

[0428] The section headings used herein are for organizational purposes only and are not to be construed as limiting the subject matter described.

### V. EXAMPLES

### Example 1: A Splice Donor Variant in MTRES1 Demonstrates Protective Associations for Dementia and Alzheimer's Disease Related Traits

[0429] Variants in MTRES1 were evaluated for associations with dementia, Alzheimer's disease and related traits in 452,401 individuals with genotype data from the UK Biobank cohort. rs117058816 is a rare (AAF=0.006) splice donor variant (c.3+1G>A) in MTRES1. This variant is considered to be a loss-of-function variant that results in a loss or change in the abundance or activity of the MTRES1 gene product.

[0430] The analyses resulted in identification of dementia and Alzheimer's disease-related associations for the MTRES1 c.3+1G>A variant. For example, c.3+1G>A was associated with decreased risk of Alzheimer's disease, dementia, delirium, and vascular dementia. c.3+1G>A was also associated with decreased risk of family history of Alzheimer's disease and decreased risk of dementia medication use (Table 2A-2B).

TABLE 2A
MTRES1 Dementia, Alzheimer's and related trait associations

| | | | | Alzheimer's Disease | | Family History of Alzheimer's | |
|---|---|---|---|---|---|---|---|
| | | | | (n = 2,864) | | Disease (n = 53,344) | |
| Variant | Gene | Function | AAF | P value | OR | P value | OR |
| rs117058816 | MTRES1 | Splice donor; c.3 + 1G > A | 0.006 | 2.58E−04 | ↓0.459 | 9.54E−03 | ↓0.893 |

TABLE 2B
MTRES1 Dementia, Alzheimer's and related trait associations

| | Dementia | | Anticholinesterase | | Delirium | | Vascular Dementia | |
|---|---|---|---|---|---|---|---|---|
| | (n = 4,009) | | Medication (n = 813) | | (n = 3,901) | | (n = 807) | |
| Variant | P value | OR | P value | OR | P value | OR | P value | OR |
| rs117058816 | 7.92E−07 | ↓0.489 | 8.04E−03 | ↓0.613 | 7.75E−03 | ↓0.667 | 7.44E−04 | ↓0.208 |

[0431] These results indicate that loss or change of function of MTRES1 results in protection from dementia and Alzheimer's disease and related diseases. These results further indicate that therapeutic modulation of MTRES1 may result in similar disease-protective effects.

### Example 2: Bioinformatic Selection of Sequences in Order to Identify Therapeutic siRNAs to Downmodulate Expression of the MTRES1 mRNA

[0432] Screening sets were defined based on bioinformatic analysis. Therapeutic siRNAs were designed to target human MTRES1, and the MTRES1 sequence of at least one toxicology-relevant species, in this case, the non-human primates (NHP) rhesus and cynomolgus monkeys. Drivers for the design of the screening set were predicted specificity of the siRNAs against the transcriptome of the relevant species as well as cross-reactivity between species. Predicted specificity in human, rhesus monkey, cynomolgus monkey, mouse and rat was determined for sense(S) and antisense (AS) strands. These were assigned a “specificity score” which considers the likelihood of unintended downregulation of any other transcript by full or partial complementarity of an siRNA strand (up to 4 mismatches within positions 2-18) as well as the number and positions of mismatches. Thus, off-target(s) for antisense and sense strands of each siRNA were identified. In addition, the number of potential off-targets was used as an additional specificity factor in the specificity score. As identified, siRNAs with high specificity and a low number of predicted off-targets provide a benefit of increased targeting specificity.

[0433] In addition to selecting siRNA sequences with high sequence specificity to MTRES1 mRNA, siRNA sequences within the seed region were analyzed for similarity to seed regions of known miRNAs. siRNAs can function in a miRNA like manner via base-pairing with complementary sequences within the 3′-UTR of mRNA molecules. The complementarity typically encompasses the 5′-bases at positions 2-7 of the miRNA (seed region). To circumvent siRNAs to act via functional miRNA binding sites, siRNA strands containing natural miRNA seed regions were avoided. Seed regions identified in miRNAs from human, mouse, rat, rhesus monkey, dog, rabbit and pig are referred to as “conserved”. Combining the “specificity score” with miRNA seed analysis yielded a “specificity category”. This is divided into categories 1-4, with 1 having the highest specificity and 4 having the lowest specificity. Each strand of the siRNA is assigned to a specificity category.

[0434] Specificity and species cross-reactivity was assessed for human, cynomolgus monkey, rhesus monkey, mouse and rat MTRES1. The analysis was based on a canonical siRNA design using 19 bases and 17 bases (without considering positions 1 and 19) for cross-reactivity. Full match as well as single mismatch analyses were included.

[0435] Analysis of the human Single Nucleotide Polymorphism (SNP) database (NCBI-DB-SNP) to identify siRNAs targeting regions with known SNPs was also carried out to identify siRNAs that may be non-functional in individuals containing the SNP. Information regarding the positions of SNPs within the target sequence as well as minor allele frequency (MAF) in case data was obtained in this analysis.

[0436] Initial analysis of the relevant MTRES1 mRNA sequence revealed few sequences that fulfil the specificity parameters and at the same time target MTRES1 mRNA in all of the analyzed relevant species. Therefore, it was decided to design independent screening subsets for the therapeutic siRNAs.

[0437] The siRNAs in these subsets recognize the human, cynomolgus monkey, rhesus monkey MTRES1 sequences. Therefore, the siRNAs in these subsets can be used to target human MTRES1 in a therapeutic setting.

[0438] The number of siRNA sequences that can be derived from human MTRES1 mRNA (ENST00000311381.8, SEQ ID NO: 2443) without consideration of specificity or species cross-reactivity was 1140 (sense and antisense strand sequences included in SEQ ID NOS: 1-2280).

[0439] Prioritizing sequences for target specificity, species cross-reactivity, miRNA seed region sequences and SNPs as described above yields subset A. Subset A contains 82 siRNAs whose base sequences are shown in Table 3.

TABLE 3
Sequences in siRNA subset A

| | SEQ | | SEQ | |
|---|---|---|---|---|
| siRNA | ID | sense strand | ID | antisense strand |
| Name | NO: | sequence (5′-3′) | NO: | sequence (5′-3′) |
| siRNA 78 | 78 | UAAGCGCCAUGGCUAUGGC | 1218 | GCCAUAGCCAUGGCGCUUA |
| siRNA 81 | 81 | GCGCCAUGGCUAUGGCUAG | 1221 | CUAGCCAUAGCCAUGGCGC |
| siRNA 87 | 87 | UGGCUAUGGCUAGUGUUAA | 1227 | UUAACACUAGCCAUAGCCA |
| siRNA 154 | 154 | GGGUGUUCUCCGAGGGACA | 1294 | UGUCCCUCGGAGAACACCC |
| siRNA 156 | 156 | GUGUUCUCCGAGGGACACC | 1296 | GGUGUCCCUCGGAGAACAC |
| siRNA 158 | 158 | GUUCUCCGAGGGACACCUU | 1298 | AAGGUGUCCCUCGGAGAAC |
| siRNA 178 | 178 | AUCAUACAAACUCUGUACU | 1318 | AGUACAGAGUUUGUAUGAU |
| siRNA 182 | 182 | UACAAACUCUGUACUUCCU | 1322 | AGGAAGUACAGAGUUUGUA |
| siRNA 190 | 190 | CUGUACUUCCUGGAAUCGA | 1330 | UCGAUUCCAGGAAGUACAG |
| siRNA 191 | 191 | UGUACUUCCUGGAAUCGAU | 1331 | AUCGAUUCCAGGAAGUACA |
| siRNA 192 | 192 | GUACUUCCUGGAAUCGAUA | 1332 | UAUCGAUUCCAGGAAGUAC |
| siRNA 193 | 193 | UACUUCCUGGAAUCGAUAC | 1333 | GUAUCGAUUCCAGGAAGUA |
| siRNA 194 | 194 | ACUUCCUGGAAUCGAUACU | 1334 | AGUAUCGAUUCCAGGAAGU |
| siRNA 195 | 195 | CUUCCUGGAAUCGAUACUU | 1335 | AAGUAUCGAUUCCAGGAAG |
| siRNA 197 | 197 | UCCUGGAAUCGAUACUUGU | 1337 | ACAAGUAUCGAUUCCAGGA |
| siRNA 198 | 198 | CCUGGAAUCGAUACUUGUA | 1338 | UACAAGUAUCGAUUCCAGG |
| siRNA 199 | 199 | CUGGAAUCGAUACUUGUAU | 1339 | AUACAAGUAUCGAUUCCAG |
| siRNA 202 | 202 | GAAUCGAUACUUGUAUUUU | 1342 | AAAAUACAAGUAUCGAUUC |
| siRNA 220 | 220 | UUCUAGUACCAAGUUACGU | 1360 | ACGUAACUUGGUACUAGAA |
| siRNA 222 | 222 | CUAGUACCAAGUUACGUGC | 1362 | GCACGUAACUUGGUACUAG |
| siRNA 223 | 223 | UAGUACCAAGUUACGUGCA | 1363 | UGCACGUAACUUGGUACUA |
| siRNA 224 | 224 | AGUACCAAGUUACGUGCAC | 1364 | GUGCACGUAACUUGGUACU |
| siRNA 225 | 225 | GUACCAAGUUACGUGCACC | 1365 | GGUGCACGUAACUUGGUAC |
| siRNA 226 | 226 | UACCAAGUUACGUGCACCA | 1366 | UGGUGCACGUAACUUGGUA |
| siRNA 227 | 227 | ACCAAGUUACGUGCACCAA | 1367 | UUGGUGCACGUAACUUGGU |
| siRNA 228 | 228 | CCAAGUUACGUGCACCAAA | 1368 | UUUGGUGCACGUAACUUGG |
| siRNA 229 | 229 | CAAGUUACGUGCACCAAAU | 1369 | AUUUGGUGCACGUAACUUG |
| siRNA 230 | 230 | AAGUUACGUGCACCAAAUU | 1370 | AAUUUGGUGCACGUAACUU |
| siRNA 231 | 231 | AGUUACGUGCACCAAAUUA | 1371 | UAAUUUGGUGCACGUAACU |
| siRNA 232 | 232 | GUUACGUGCACCAAAUUAU | 1372 | AUAAUUUGGUGCACGUAAC |
| siRNA 233 | 233 | UUACGUGCACCAAAUUAUA | 1373 | UAUAAUUUGGUGCACGUAA |
| siRNA 235 | 235 | ACGUGCACCAAAUUAUAAA | 1375 | UUUAUAAUUUGGUGCACGU |
| siRNA 331 | 331 | AAGACUCAAAAGUAAUAUA | 1471 | UAUAUUACUUUUGAGUCUU |
| siRNA 358 | 358 | AAAAUCUACUAAAAAGUCU | 1498 | AGACUUUUUAGUAGAUUUU |
| siRNA 360 | 360 | AAUCUACUAAAAAGUCUCU | 1500 | AGAGACUUUUUAGUAGAUU |
| siRNA 361 | 361 | AUCUACUAAAAAGUCUCUG | 1501 | CAGAGACUUUUUAGUAGAU |
| siRNA 362 | 362 | UCUACUAAAAAGUCUCUGC | 1502 | GCAGAGACUUUUUAGUAGA |
| siRNA 528 | 528 | UGAAGACGGGGCUAGAUAU | 1668 | AUAUCUAGCCCCGUCUUCA |
| siRNA 534 | 534 | CGGGGCUAGAUAUUGGGAG | 1674 | CUCCCAAUAUCUAGCCCCG |
| siRNA 539 | 539 | CUAGAUAUUGGGAGAAACA | 1679 | UGUUUCUCCCAAUAUCUAG |
| siRNA 619 | 619 | AAGCAGAACGGUGAAAGUG | 1759 | CACUUUCACCGUUCUGCUU |
| siRNA 620 | 620 | AGCAGAACGGUGAAAGUGG | 1760 | CCACUUUCACCGUUCUGCU |
| siRNA 621 | 621 | GCAGAACGGUGAAAGUGGG | 1761 | CCCACUUUCACCGUUCUGC |
| siRNA 632 | 632 | AAAGUGGGAGAUACAUUGG | 1772 | CCAAUGUAUCUCCCACUUU |
| siRNA 633 | 633 | AAGUGGGAGAUACAUUGGA | 1773 | UCCAAUGUAUCUCCCACUU |
| siRNA 634 | 634 | AGUGGGAGAUACAUUGGAU | 1774 | AUCCAAUGUAUCUCCCACU |
| siRNA 636 | 636 | UGGGAGAUACAUUGGAUCU | 1776 | AGAUCCAAUGUAUCUCCCA |
| siRNA 642 | 642 | AUACAUUGGAUCUUCUCAU | 1782 | AUGAGAAGAUCCAAUGUAU |
| siRNA 645 | 645 | CAUUGGAUCUUCUCAUUGG | 1785 | CCAAUGAGAAGAUCCAAUG |
| siRNA 646 | 646 | AUUGGAUCUUCUCAUUGGA | 1786 | UCCAAUGAGAAGAUCCAAU |
| siRNA 647 | 647 | UUGGAUCUUCUCAUUGGAG | 1787 | CUCCAAUGAGAAGAUCCAA |
| siRNA 648 | 648 | UGGAUCUUCUCAUUGGAGA | 1788 | UCUCCAAUGAGAAGAUCCA |
| siRNA 650 | 650 | GAUCUUCUCAUUGGAGAGG | 1790 | CCUCUCCAAUGAGAAGAUC |
| siRNA 654 | 654 | UUCUCAUUGGAGAGGAUAA | 1794 | UUAUCCUCUCCAAUGAGAA |
| siRNA 656 | 656 | CUCAUUGGAGAGGAUAAAG | 1796 | CUUUAUCCUCUCCAAUGAG |
| siRNA 687 | 687 | AGACAGUUAUGCGGAUUCU | 1827 | AGAAUCCGCAUAACUGUCU |
| siRNA 688 | 688 | GACAGUUAUGCGGAUUCUC | 1828 | GAGAAUCCGCAUAACUGUC |
| siRNA 690 | 690 | CAGUUAUGCGGAUUCUCUU | 1830 | AAGAGAAUCCGCAUAACUG |
| siRNA 693 | 693 | UUAUGCGGAUUCUCUUGAA | 1833 | UUCAAGAGAAUCCGCAUAA |
| siRNA 694 | 694 | UAUGCGGAUUCUCUUGAAA | 1834 | UUUCAAGAGAAUCCGCAUA |
| siRNA 695 | 695 | AUGCGGAUUCUCUUGAAAA | 1835 | UUUUCAAGAGAAUCCGCAU |
| siRNA 745 | 745 | AUACAGAGUGGUGUUACGG | 1885 | CCGUAACACCACUCUGUAU |
| siRNA 746 | 746 | UACAGAGUGGUGUUACGGC | 1886 | GCCGUAACACCACUCUGUA |
| siRNA 748 | 748 | CAGAGUGGUGUUACGGCGG | 1888 | CCGCCGUAACACCACUCUG |
| siRNA 749 | 749 | AGAGUGGUGUUACGGCGGU | 1889 | ACCGCCGUAACACCACUCU |
| siRNA 751 | 751 | AGUGGUGUUACGGCGGUGG | 1891 | CCACCGCCGUAACACCACU |
| siRNA 752 | 752 | GUGGUGUUACGGCGGUGGA | 1892 | UCCACCGCCGUAACACCAC |
| siRNA 753 | 753 | UGGUGUUACGGCGGUGGAA | 1893 | UUCCACCGCCGUAACACCA |
| siRNA 754 | 754 | GGUGUUACGGCGGUGGAAA | 1894 | UUUCCACCGCCGUAACACC |
| siRNA 755 | 755 | GUGUUACGGCGGUGGAAAA | 1895 | UUUUCCACCGCCGUAACAC |
| siRNA 756 | 756 | UGUUACGGCGGUGGAAAAG | 1896 | CUUUUCCACCGCCGUAACA |
| siRNA 757 | 757 | GUUACGGCGGUGGAAAAGU | 1897 | ACUUUUCCACCGCCGUAAC |
| siRNA 758 | 758 | UUACGGCGGUGGAAAAGUU | 1898 | AACUUUUCCACCGCCGUAA |
| siRNA 759 | 759 | UACGGCGGUGGAAAAGUUU | 1899 | AAACUUUUCCACCGCCGUA |
| siRNA 761 | 761 | CGGCGGUGGAAAAGUUUAA | 1901 | UUAAACUUUUCCACCGCCG |
| siRNA 773 | 773 | AGUUUAAAGUUGCCUAAGA | 1913 | UCUUAGGCAACUUUAAACU |
| siRNA 775 | 775 | UUUAAAGUUGCCUAAGAAG | 1915 | CUUCUUAGGCAACUUUAAA |
| siRNA 808 | 808 | AAUGGAUUGCUUUUUAGCA | 1948 | UGCUAAAAAGCAAUCCAUU |
| siRNA 810 | 810 | UGGAUUGCUUUUUAGCAAU | 1950 | AUUGCUAAAAAGCAAUCCA |
| siRNA 852 | 852 | GAAGGGGUCACCUGAAAAA | 1992 | UUUUUCAGGUGACCCCUUC |
| siRNA 853 | 853 | AAGGGGUCACCUGAAAAAU | 1993 | AUUUUUCAGGUGACCCCUU |
| siRNA 887 | 887 | AAAUAAAGUUCUCUUAGCG | 2027 | CGCUAAGAGAACUUUAUUU |

[0440] The siRNAs in subset A have the following characteristics:
[0441] Cross-reactivity: With 19mer in human MTRES1 mRNA, with 17mer/19mer in NHP MTRES1
[0442] Specificity category: For human and NHP: AS2 or better, SS3 or better
[0443] miRNA seeds: AS+SS strand: seed region not conserved in human, mouse, and rat and not present in >4 species
[0444] Off-target frequency: ≤20 human off-targets matched with 2 mismatches in antisense strand
[0445] SNPs: siRNA target sites do not harbor SNPs with a MAF≥1% (pos. 2-18)

[0446] The siRNA sequences in subset A were selected for more stringent specificity to yield subset B. Subset B includes 73 siRNAs whose base sequences are shown in Table 4.

TABLE 4
Sequences in siRNA subset B

| SEQ ID | sense strand | SEQ ID | antisense strand |
|---|---|---|---|
| NO: | sequence (5′-3′) | NO: | sequence (5′-3′) |
| 78 | UAAGCGCCAUGGCUAUGGC | 1218 | GCCAUAGCCAUGGCGCUUA |
| 81 | GCGCCAUGGCUAUGGCUAG | 1221 | CUAGCCAUAGCCAUGGCGC |
| 87 | UGGCUAUGGCUAGUGUUAA | 1227 | UUAACACUAGCCAUAGCCA |
| 154 | GGGUGUUCUCCGAGGGACA | 1294 | UGUCCCUCGGAGAACACCC |
| 156 | GUGUUCUCCGAGGGACACC | 1296 | GGUGUCCCUCGGAGAACAC |
| 158 | GUUCUCCGAGGGACACCUU | 1298 | AAGGUGUCCCUCGGAGAAC |
| 178 | AUCAUACAAACUCUGUACU | 1318 | AGUACAGAGUUUGUAUGAU |
| 182 | UACAAACUCUGUACUUCCU | 1322 | AGGAAGUACAGAGUUUGUA |
| 190 | CUGUACUUCCUGGAAUCGA | 1330 | UCGAUUCCAGGAAGUACAG |
| 191 | UGUACUUCCUGGAAUCGAU | 1331 | AUCGAUUCCAGGAAGUACA |
| 192 | GUACUUCCUGGAAUCGAUA | 1332 | UAUCGAUUCCAGGAAGUAC |
| 193 | UACUUCCUGGAAUCGAUAC | 1333 | GUAUCGAUUCCAGGAAGUA |
| 195 | CUUCCUGGAAUCGAUACUU | 1335 | AAGUAUCGAUUCCAGGAAG |
| 197 | UCCUGGAAUCGAUACUUGU | 1337 | ACAAGUAUCGAUUCCAGGA |
| 198 | CCUGGAAUCGAUACUUGUA | 1338 | UACAAGUAUCGAUUCCAGG |
| 199 | CUGGAAUCGAUACUUGUAU | 1339 | AUACAAGUAUCGAUUCCAG |
| 202 | GAAUCGAUACUUGUAUUUU | 1342 | AAAAUACAAGUAUCGAUUC |
| 220 | UUCUAGUACCAAGUUACGU | 1360 | ACGUAACUUGGUACUAGAA |
| 222 | CUAGUACCAAGUUACGUGC | 1362 | GCACGUAACUUGGUACUAG |
| 223 | UAGUACCAAGUUACGUGCA | 1363 | UGCACGUAACUUGGUACUA |
| 224 | AGUACCAAGUUACGUGCAC | 1364 | GUGCACGUAACUUGGUACU |
| 225 | GUACCAAGUUACGUGCACC | 1365 | GGUGCACGUAACUUGGUAC |
| 226 | UACCAAGUUACGUGCACCA | 1366 | UGGUGCACGUAACUUGGUA |
| 227 | ACCAAGUUACGUGCACCAA | 1367 | UUGGUGCACGUAACUUGGU |
| 228 | CCAAGUUACGUGCACCAAA | 1368 | UUUGGUGCACGUAACUUGG |
| 229 | CAAGUUACGUGCACCAAAU | 1369 | AUUUGGUGCACGUAACUUG |
| 230 | AAGUUACGUGCACCAAAUU | 1370 | AAUUUGGUGCACGUAACUU |
| 231 | AGUUACGUGCACCAAAUUA | 1371 | UAAUUUGGUGCACGUAACU |
| 232 | GUUACGUGCACCAAAUUAU | 1372 | AUAAUUUGGUGCACGUAAC |
| 233 | UUACGUGCACCAAAUUAUA | 1373 | UAUAAUUUGGUGCACGUAA |
| 235 | ACGUGCACCAAAUUAUAAA | 1375 | UUUAUAAUUUGGUGCACGU |
| 358 | AAAAUCUACUAAAAAGUCU | 1498 | AGACUUUUUAGUAGAUUUU |
| 360 | AAUCUACUAAAAAGUCUCU | 1500 | AGAGACUUUUUAGUAGAUU |
| 362 | UCUACUAAAAAGUCUCUGC | 1502 | GCAGAGACUUUUUAGUAGA |
| 528 | UGAAGACGGGGCUAGAUAU | 1668 | AUAUCUAGCCCCGUCUUCA |
| 534 | CGGGGCUAGAUAUUGGGAG | 1674 | CUCCCAAUAUCUAGCCCCG |
| 539 | CUAGAUAUUGGGAGAAACA | 1679 | UGUUUCUCCCAAUAUCUAG |
| 619 | AAGCAGAACGGUGAAAGUG | 1759 | CACUUUCACCGUUCUGCUU |
| 620 | AGCAGAACGGUGAAAGUGG | 1760 | CCACUUUCACCGUUCUGCU |
| 621 | GCAGAACGGUGAAAGUGGG | 1761 | CCCACUUUCACCGUUCUGC |
| 632 | AAAGUGGGAGAUACAUUGG | 1772 | CCAAUGUAUCUCCCACUUU |
| 633 | AAGUGGGAGAUACAUUGGA | 1773 | UCCAAUGUAUCUCCCACUU |
| 636 | UGGGAGAUACAUUGGAUCU | 1776 | AGAUCCAAUGUAUCUCCCA |
| 642 | AUACAUUGGAUCUUCUCAU | 1782 | AUGAGAAGAUCCAAUGUAU |
| 645 | CAUUGGAUCUUCUCAUUGG | 1785 | CCAAUGAGAAGAUCCAAUG |
| 647 | UUGGAUCUUCUCAUUGGAG | 1787 | CUCCAAUGAGAAGAUCCAA |
| 648 | UGGAUCUUCUCAUUGGAGA | 1788 | UCUCCAAUGAGAAGAUCCA |
| 654 | UUCUCAUUGGAGAGGAUAA | 1794 | UUAUCCUCUCCAAUGAGAA |
| 656 | CUCAUUGGAGAGGAUAAAG | 1796 | CUUUAUCCUCUCCAAUGAG |
| 687 | AGACAGUUAUGCGGAUUCU | 1827 | AGAAUCCGCAUAACUGUCU |
| 688 | GACAGUUAUGCGGAUUCUC | 1828 | GAGAAUCCGCAUAACUGUC |
| 690 | CAGUUAUGCGGAUUCUCUU | 1830 | AAGAGAAUCCGCAUAACUG |
| 693 | UUAUGCGGAUUCUCUUGAA | 1833 | UUCAAGAGAAUCCGCAUAA |
| 694 | UAUGCGGAUUCUCUUGAAA | 1834 | UUUCAAGAGAAUCCGCAUA |
| 695 | AUGCGGAUUCUCUUGAAAA | 1835 | UUUUCAAGAGAAUCCGCAU |
| 745 | AUACAGAGUGGUGUUACGG | 1885 | CCGUAACACCACUCUGUAU |
| 746 | UACAGAGUGGUGUUACGGC | 1886 | GCCGUAACACCACUCUGUA |
| 748 | CAGAGUGGUGUUACGGCGG | 1888 | CCGCCGUAACACCACUCUG |
| 749 | AGAGUGGUGUUACGGCGGU | 1889 | ACCGCCGUAACACCACUCU |
| 751 | AGUGGUGUUACGGCGGUGG | 1891 | CCACCGCCGUAACACCACU |
| 752 | GUGGUGUUACGGCGGUGGA | 1892 | UCCACCGCCGUAACACCAC |
| 753 | UGGUGUUACGGCGGUGGAA | 1893 | UUCCACCGCCGUAACACCA |
| 754 | GGUGUUACGGCGGUGGAAA | 1894 | UUUCCACCGCCGUAACACC |
| 755 | GUGUUACGGCGGUGGAAAA | 1895 | UUUUCCACCGCCGUAACAC |
| 756 | UGUUACGGCGGUGGAAAAG | 1896 | CUUUUCCACCGCCGUAACA |
| 757 | GUUACGGCGGUGGAAAAGU | 1897 | ACUUUUCCACCGCCGUAAC |
| 758 | UUACGGCGGUGGAAAAGUU | 1898 | AACUUUUCCACCGCCGUAA |
| 759 | UACGGCGGUGGAAAAGUUU | 1899 | AAACUUUUCCACCGCCGUA |
| 761 | CGGCGGUGGAAAAGUUUAA | 1901 | UUAAACUUUUCCACCGCCG |
| 773 | AGUUUAAAGUUGCCUAAGA | 1913 | UCUUAGGCAACUUUAAACU |
| 808 | AAUGGAUUGCUUUUUAGCA | 1948 | UGCUAAAAAGCAAUCCAUU |
| 852 | GAAGGGGUCACCUGAAAAA | 1992 | UUUUUCAGGUGACCCCUUC |
| 853 | AAGGGGUCACCUGAAAAAU | 1993 | AUUUUUCAGGUGACCCCUU |

[0447] The siRNAs in subset B have the following characteristics:
[0448] Cross-reactivity: With 19mer in human MTRES1 mRNA, with 17mer/19mer in NHP MTRES1
[0449] Specificity category: For human and NHP: AS2 or better, SS3 or better
[0450] miRNA seeds: AS+SS strand: seed region not conserved in human, mouse, and rat and not present in >4 species
[0451] Off-target frequency: ≤15 human off-targets matched with 2 mismatches in antisense strand
[0452] SNPs: siRNA target sites do not harbor SNPs with a MAF≥1% (pos. 2-18)

[0453] The siRNA sequences in subset B were further selected for absence of seed regions in the AS strand that are identical to a seed region of known human miRNA to yield subset C. Subset C includes 54 siRNAs whose base sequences are shown in Table 5.

TABLE 5
Sequences in siRNA subset C

| SEQ ID | sense strand | SEQ ID | antisense strand |
|---|---|---|---|
| NO: | sequence (5′-3′) | NO: | sequence (5′-3′) |
| 78 | UAAGCGCCAUGGCUAUGGC | 1218 | GCCAUAGCCAUGGCGCUUA |
| 87 | UGGCUAUGGCUAGUGUUAA | 1227 | UUAACACUAGCCAUAGCCA |
| 154 | GGGUGUUCUCCGAGGGACA | 1294 | UGUCCCUCGGAGAACACCC |
| 158 | GUUCUCCGAGGGACACCUU | 1298 | AAGGUGUCCCUCGGAGAAC |
| 178 | AUCAUACAAACUCUGUACU | 1318 | AGUACAGAGUUUGUAUGAU |
| 182 | UACAAACUCUGUACUUCCU | 1322 | AGGAAGUACAGAGUUUGUA |
| 190 | CUGUACUUCCUGGAAUCGA | 1330 | UCGAUUCCAGGAAGUACAG |
| 191 | UGUACUUCCUGGAAUCGAU | 1331 | AUCGAUUCCAGGAAGUACA |
| 192 | GUACUUCCUGGAAUCGAUA | 1332 | UAUCGAUUCCAGGAAGUAC |
| 193 | UACUUCCUGGAAUCGAUAC | 1333 | GUAUCGAUUCCAGGAAGUA |
| 195 | CUUCCUGGAAUCGAUACUU | 1335 | AAGUAUCGAUUCCAGGAAG |
| 199 | CUGGAAUCGAUACUUGUAU | 1339 | AUACAAGUAUCGAUUCCAG |
| 202 | GAAUCGAUACUUGUAUUUU | 1342 | AAAAUACAAGUAUCGAUUC |
| 220 | UUCUAGUACCAAGUUACGU | 1360 | ACGUAACUUGGUACUAGAA |
| 222 | CUAGUACCAAGUUACGUGC | 1362 | GCACGUAACUUGGUACUAG |
| 223 | UAGUACCAAGUUACGUGCA | 1363 | UGCACGUAACUUGGUACUA |
| 224 | AGUACCAAGUUACGUGCAC | 1364 | GUGCACGUAACUUGGUACU |
| 225 | GUACCAAGUUACGUGCACC | 1365 | GGUGCACGUAACUUGGUAC |
| 226 | UACCAAGUUACGUGCACCA | 1366 | UGGUGCACGUAACUUGGUA |
| 227 | ACCAAGUUACGUGCACCAA | 1367 | UUGGUGCACGUAACUUGGU |
| 228 | CCAAGUUACGUGCACCAAA | 1368 | UUUGGUGCACGUAACUUGG |
| 229 | CAAGUUACGUGCACCAAAU | 1369 | AUUUGGUGCACGUAACUUG |
| 231 | AGUUACGUGCACCAAAUUA | 1371 | UAAUUUGGUGCACGUAACU |
| 233 | UUACGUGCACCAAAUUAUA | 1373 | UAUAAUUUGGUGCACGUAA |
| 235 | ACGUGCACCAAAUUAUAAA | 1375 | UUUAUAAUUUGGUGCACGU |
| 358 | AAAAUCUACUAAAAAGUCU | 1498 | AGACUUUUUAGUAGAUUUU |
| 528 | UGAAGACGGGGCUAGAUAU | 1668 | AUAUCUAGCCCCGUCUUCA |
| 534 | CGGGGCUAGAUAUUGGGAG | 1674 | CUCCCAAUAUCUAGCCCCG |
| 539 | CUAGAUAUUGGGAGAAACA | 1679 | UGUUUCUCCCAAUAUCUAG |
| 619 | AAGCAGAACGGUGAAAGUG | 1759 | CACUUUCACCGUUCUGCUU |
| 620 | AGCAGAACGGUGAAAGUGG | 1760 | CCACUUUCACCGUUCUGCU |
| 621 | GCAGAACGGUGAAAGUGGG | 1761 | CCCACUUUCACCGUUCUGC |
| 632 | AAAGUGGGAGAUACAUUGG | 1772 | CCAAUGUAUCUCCCACUUU |
| 633 | AAGUGGGAGAUACAUUGGA | 1773 | UCCAAUGUAUCUCCCACUU |
| 636 | UGGGAGAUACAUUGGAUCU | 1776 | AGAUCCAAUGUAUCUCCCA |
| 645 | CAUUGGAUCUUCUCAUUGG | 1785 | CCAAUGAGAAGAUCCAAUG |
| 647 | UUGGAUCUUCUCAUUGGAG | 1787 | CUCCAAUGAGAAGAUCCAA |
| 656 | CUCAUUGGAGAGGAUAAAG | 1796 | CUUUAUCCUCUCCAAUGAG |
| 687 | AGACAGUUAUGCGGAUUCU | 1827 | AGAAUCCGCAUAACUGUCU |
| 688 | GACAGUUAUGCGGAUUCUC | 1828 | GAGAAUCCGCAUAACUGUC |
| 745 | AUACAGAGUGGUGUUACGG | 1885 | CCGUAACACCACUCUGUAU |
| 746 | UACAGAGUGGUGUUACGGC | 1886 | GCCGUAACACCACUCUGUA |
| 748 | CAGAGUGGUGUUACGGCGG | 1888 | CCGCCGUAACACCACUCUG |
| 749 | AGAGUGGUGUUACGGCGGU | 1889 | ACCGCCGUAACACCACUCU |
| 751 | AGUGGUGUUACGGCGGUGG | 1891 | CCACCGCCGUAACACCACU |
| 752 | GUGGUGUUACGGCGGUGGA | 1892 | UCCACCGCCGUAACACCAC |
| 753 | UGGUGUUACGGCGGUGGAA | 1893 | UUCCACCGCCGUAACACCA |
| 755 | GUGUUACGGCGGUGGAAAA | 1895 | UUUUCCACCGCCGUAACAC |
| 756 | UGUUACGGCGGUGGAAAAG | 1896 | CUUUUCCACCGCCGUAACA |
| 759 | UACGGCGGUGGAAAAGUUU | 1899 | AAACUUUUCCACCGCCGUA |
| 761 | CGGCGGUGGAAAAGUUUAA | 1901 | UUAAACUUUUCCACCGCCG |
| 773 | AGUUUAAAGUUGCCUAAGA | 1913 | UCUUAGGCAACUUUAAACU |
| 808 | AAUGGAUUGCUUUUUAGCA | 1948 | UGCUAAAAAGCAAUCCAUU |
| 853 | AAGGGGUCACCUGAAAAAU | 1993 | AUUUUUCAGGUGACCCCUU |

[0454] The siRNAs in subset C have the following characteristics:
[0455] Cross-reactivity: With 19mer in human MTRES1 mRNA, with 17mer/19mer in NHP MTRES1
[0456] Specificity category: For human and NHP: AS2 or better, SS3 or better
[0457] miRNA seeds: AS+SS strand: seed region not conserved in human, mouse, and rat and not present in >4 species. AS strand: seed region not identical to seed region of known human miRNA
[0458] Off-target frequency: ≤15 human off-targets matched with 2 mismatches by antisense strand
[0459] SNPs: siRNA target sites do not harbor SNPs with a MAF≥1% (pos. 2-18)

[0460] The siRNA sequences in subset C were also selected for absence of seed regions in the AS or S strands that are identical to a seed region of known human miRNA to yield subset D. Subset D includes 35 siRNAs whose base sequences are shown in Table 6.

TABLE 6
Sequences in siRNA subset D

| SEQ ID | sense strand | SEQ ID | antisense strand |
|---|---|---|---|
| NO: | sequence (5′-3′) | NO: | sequence (5′-3′) |
| 87 | UGGCUAUGGCUAGUGUUAA | 1227 | UUAACACUAGCCAUAGCCA |
| 182 | UACAAACUCUGUACUUCCU | 1322 | AGGAAGUACAGAGUUUGUA |
| 190 | CUGUACUUCCUGGAAUCGA | 1330 | UCGAUUCCAGGAAGUACAG |
| 191 | UGUACUUCCUGGAAUCGAU | 1331 | AUCGAUUCCAGGAAGUACA |
| 193 | UACUUCCUGGAAUCGAUAC | 1333 | GUAUCGAUUCCAGGAAGUA |
| 194 | ACUUCCUGGAAUCGAUACU | 1334 | AGUAUCGAUUCCAGGAAGU |
| 202 | GAAUCGAUACUUGUAUUUU | 1342 | AAAAUACAAGUAUCGAUUC |
| 220 | UUCUAGUACCAAGUUACGU | 1360 | ACGUAACUUGGUACUAGAA |
| 222 | CUAGUACCAAGUUACGUGC | 1362 | GCACGUAACUUGGUACUAG |
| 224 | AGUACCAAGUUACGUGCAC | 1364 | GUGCACGUAACUUGGUACU |
| 225 | GUACCAAGUUACGUGCACC | 1365 | GGUGCACGUAACUUGGUAC |
| 226 | UACCAAGUUACGUGCACCA | 1366 | UGGUGCACGUAACUUGGUA |
| 228 | CCAAGUUACGUGCACCAAA | 1368 | UUUGGUGCACGUAACUUGG |
| 229 | CAAGUUACGUGCACCAAAU | 1369 | AUUUGGUGCACGUAACUUG |
| 231 | AGUUACGUGCACCAAAUUA | 1371 | UAAUUUGGUGCACGUAACU |
| 233 | UUACGUGCACCAAAUUAUA | 1373 | UAUAAUUUGGUGCACGUAA |
| 358 | AAAAUCUACUAAAAAGUCU | 1498 | AGACUUUUUAGUAGAUUUU |
| 361 | AUCUACUAAAAAGUCUCUG | 1501 | CAGAGACUUUUUAGUAGAU |
| 528 | UGAAGACGGGGCUAGAUAU | 1668 | AUAUCUAGCCCCGUCUUCA |
| 539 | CUAGAUAUUGGGAGAAACA | 1679 | UGUUUCUCCCAAUAUCUAG |
| 619 | AAGCAGAACGGUGAAAGUG | 1759 | CACUUUCACCGUUCUGCUU |
| 645 | CAUUGGAUCUUCUCAUUGG | 1785 | CCAAUGAGAAGAUCCAAUG |
| 647 | UUGGAUCUUCUCAUUGGAG | 1787 | CUCCAAUGAGAAGAUCCAA |
| 688 | GACAGUUAUGCGGAUUCUC | 1828 | GAGAAUCCGCAUAACUGUC |
| 745 | AUACAGAGUGGUGUUACGG | 1885 | CCGUAACACCACUCUGUAU |
| 751 | AGUGGUGUUACGGCGGUGG | 1891 | CCACCGCCGUAACACCACU |
| 752 | GUGGUGUUACGGCGGUGGA | 1892 | UCCACCGCCGUAACACCAC |
| 755 | GUGUUACGGCGGUGGAAAA | 1895 | UUUUCCACCGCCGUAACAC |
| 756 | UGUUACGGCGGUGGAAAAG | 1896 | CUUUUCCACCGCCGUAACA |
| 759 | UACGGCGGUGGAAAAGUUU | 1899 | AAACUUUUCCACCGCCGUA |
| 761 | CGGCGGUGGAAAAGUUUAA | 1901 | UUAAACUUUUCCACCGCCG |
| 773 | AGUUUAAAGUUGCCUAAGA | 1913 | UCUUAGGCAACUUUAAACU |
| 775 | UUUAAAGUUGCCUAAGAAG | 1915 | CUUCUUAGGCAACUUUAAA |
| 810 | UGGAUUGCUUUUUAGCAAU | 1950 | AUUGCUAAAAAGCAAUCCA |
| 887 | AAAUAAAGUUCUCUUAGCG | 2027 | CGCUAAGAGAACUUUAUUU |

[0461] The siRNAs in subset D have the following characteristics:
[0462] Cross-reactivity: With 19mer in human MTRES1 mRNA, with 17mer/19mer in NHP MTRES1
[0463] Specificity category: For human and NHP: AS2 or better, SS3 or better
[0464] miRNA seeds: AS+SS strand: seed region not conserved in human, mouse, and rat and not present in >4 species. AS+SS strand: seed region not identical to seed region of known human miRNA
[0465] Off-target frequency: ≤20 human off-targets matched with 2 mismatches by antisense strand
[0466] SNPs: siRNA target sites do not harbor SNPs with a MAF≥1% (pos. 2-18)

[0467] The siRNA sequences in subset D were further selected for more stringent specificity to yield subset E. Subset E includes 30 siRNAs whose base sequences are shown in Table 7.

TABLE 7
Sequences in siRNA subset E

| SEQ ID | sense strand | SEQ ID | antisense strand |
|---|---|---|---|
| NO: | sequence (5′-3′) | NO: | sequence (5′-3′) |
| 87 | UGGCUAUGGCUAGUGUUAA | 1227 | UUAACACUAGCCAUAGCCA |
| 182 | UACAAACUCUGUACUUCCU | 1322 | AGGAAGUACAGAGUUUGUA |
| 190 | CUGUACUUCCUGGAAUCGA | 1330 | UCGAUUCCAGGAAGUACAG |
| 191 | UGUACUUCCUGGAAUCGAU | 1331 | AUCGAUUCCAGGAAGUACA |
| 193 | UACUUCCUGGAAUCGAUAC | 1333 | GUAUCGAUUCCAGGAAGUA |
| 202 | GAAUCGAUACUUGUAUUUU | 1342 | AAAAUACAAGUAUCGAUUC |
| 220 | UUCUAGUACCAAGUUACGU | 1360 | ACGUAACUUGGUACUAGAA |
| 222 | CUAGUACCAAGUUACGUGC | 1362 | GCACGUAACUUGGUACUAG |
| 224 | AGUACCAAGUUACGUGCAC | 1364 | GUGCACGUAACUUGGUACU |
| 225 | GUACCAAGUUACGUGCACC | 1365 | GGUGCACGUAACUUGGUAC |
| 226 | UACCAAGUUACGUGCACCA | 1366 | UGGUGCACGUAACUUGGUA |
| 228 | CCAAGUUACGUGCACCAAA | 1368 | UUUGGUGCACGUAACUUGG |
| 229 | CAAGUUACGUGCACCAAAU | 1369 | AUUUGGUGCACGUAACUUG |
| 231 | AGUUACGUGCACCAAAUUA | 1371 | UAAUUUGGUGCACGUAACU |
| 233 | UUACGUGCACCAAAUUAUA | 1373 | UAUAAUUUGGUGCACGUAA |
| 358 | AAAAUCUACUAAAAAGUCU | 1498 | AGACUUUUUAGUAGAUUUU |
| 528 | UGAAGACGGGGCUAGAUAU | 1668 | AUAUCUAGCCCCGUCUUCA |
| 539 | CUAGAUAUUGGGAGAAACA | 1679 | UGUUUCUCCCAAUAUCUAG |
| 619 | AAGCAGAACGGUGAAAGUG | 1759 | CACUUUCACCGUUCUGCUU |
| 645 | CAUUGGAUCUUCUCAUUGG | 1785 | CCAAUGAGAAGAUCCAAUG |
| 647 | UUGGAUCUUCUCAUUGGAG | 1787 | CUCCAAUGAGAAGAUCCAA |
| 688 | GACAGUUAUGCGGAUUCUC | 1828 | GAGAAUCCGCAUAACUGUC |
| 745 | AUACAGAGUGGUGUUACGG | 1885 | CCGUAACACCACUCUGUAU |
| 751 | AGUGGUGUUACGGCGGUGG | 1891 | CCACCGCCGUAACACCACU |
| 752 | GUGGUGUUACGGCGGUGGA | 1892 | UCCACCGCCGUAACACCAC |
| 755 | GUGUUACGGCGGUGGAAAA | 1895 | UUUUCCACCGCCGUAACAC |
| 756 | UGUUACGGCGGUGGAAAAG | 1896 | CUUUUCCACCGCCGUAACA |
| 759 | UACGGCGGUGGAAAAGUUU | 1899 | AAACUUUUCCACCGCCGUA |
| 761 | CGGCGGUGGAAAAGUUUAA | 1901 | UUAAACUUUUCCACCGCCG |
| 773 | AGUUUAAAGUUGCCUAAGA | 1913 | UCUUAGGCAACUUUAAACU |

[0468] The siRNAs in subset E have the following characteristics:
[0469] Cross-reactivity: With 19mer in human MTRES1 mRNA, with 17mer/19mer in NHP MTRES1
[0470] Specificity category: For human and NHP: AS2 or better, SS3 or better
[0471] miRNA seeds: AS+SS strand: seed region not conserved in human, mouse, and rat and not present in >4 species. AS+SS strand: seed region not identical to seed region of known human miRNA
[0472] Off-target frequency: ≤15 human off-targets matched with 2 mismatches by antisense strand
[0473] SNPs: siRNA target sites do not harbor SNPs with a MAF≥1% (pos. 2-18)

[0474] Subset F includes 54 siRNAs. The siRNAs in subset F include siRNAs from subset A, and are included in Table 8. In some cases, the sense strand of any of the siRNAs of subset F comprises modification pattern 6S (Table 9). In some cases, the antisense strand of any of the siRNAs of subset F comprises modification pattern 7AS (Table 9, “subset G”). In some cases, the sense strand of any of the siRNAs of subset F contains an alternative modification pattern (Table 10, “subset H”). In some cases, the antisense strand of any of the siRNAs of subset F comprises modification pattern 7AS (Table 10). The siRNAs in subset F may comprise any other modification pattern(s). In Table 9 and Table 10, Nf (e.g. Af, Cf, Gf, Tf, or Uf) is a 2′-fluoro-modified nucleoside, n (e.g. a, c, g, t, or u) is a 2′-O-methyl modified nucleoside, and “s” is a phosphorothioate linkage.

TABLE 8
Sequences in siRNA subset F

| SEQ ID | sense strand | SEQ ID | antisense strand |
|---|---|---|---|
| NO: | sequence (5′-3′) | NO: | sequence (5′-3′) |
| 87 | UGGCUAUGGCUAGUGUUAA | 1227 | UUAACACUAGCCAUAGCCA |
| 178 | AUCAUACAAACUCUGUACU | 1318 | AGUACAGAGUUUGUAUGAU |
| 190 | CUGUACUUCCUGGAAUCGA | 1330 | UCGAUUCCAGGAAGUACAG |
| 191 | UGUACUUCCUGGAAUCGAU | 1331 | AUCGAUUCCAGGAAGUACA |
| 192 | GUACUUCCUGGAAUCGAUA | 1332 | UAUCGAUUCCAGGAAGUAC |
| 193 | UACUUCCUGGAAUCGAUAC | 1333 | GUAUCGAUUCCAGGAAGUA |
| 195 | CUUCCUGGAAUCGAUACUU | 1335 | AAGUAUCGAUUCCAGGAAG |
| 199 | CUGGAAUCGAUACUUGUAU | 1339 | AUACAAGUAUCGAUUCCAG |
| 202 | GAAUCGAUACUUGUAUUUU | 1342 | AAAAUACAAGUAUCGAUUC |
| 222 | CUAGUACCAAGUUACGUGC | 1362 | GCACGUAACUUGGUACUAG |
| 223 | UAGUACCAAGUUACGUGCA | 1363 | UGCACGUAACUUGGUACUA |
| 224 | AGUACCAAGUUACGUGCAC | 1364 | GUGCACGUAACUUGGUACU |
| 225 | GUACCAAGUUACGUGCACC | 1365 | GGUGCACGUAACUUGGUAC |
| 226 | UACCAAGUUACGUGCACCA | 1366 | UGGUGCACGUAACUUGGUA |
| 228 | CCAAGUUACGUGCACCAAA | 1368 | UUUGGUGCACGUAACUUGG |
| 229 | CAAGUUACGUGCACCAAAU | 1369 | AUUUGGUGCACGUAACUUG |
| 230 | AAGUUACGUGCACCAAAUU | 1370 | AAUUUGGUGCACGUAACUU |
| 232 | GUUACGUGCACCAAAUUAU | 1372 | AUAAUUUGGUGCACGUAAC |
| 233 | UUACGUGCACCAAAUUAUA | 1373 | UAUAAUUUGGUGCACGUAA |
| 331 | AAGACUCAAAAGUAAUAUA | 1471 | UAUAUUACUUUUGAGUCUU |
| 358 | AAAAUCUACUAAAAAGUCU | 1498 | AGACUUUUUAGUAGAUUUU |
| 362 | UCUACUAAAAAGUCUCUGC | 1502 | GCAGAGACUUUUUAGUAGA |
| 528 | UGAAGACGGGGCUAGAUAU | 1668 | AUAUCUAGCCCCGUCUUCA |
| 539 | CUAGAUAUUGGGAGAAACA | 1679 | UGUUUCUCCCAAUAUCUAG |
| 620 | AGCAGAACGGUGAAAGUGG | 1760 | CCACUUUCACCGUUCUGCU |
| 632 | AAAGUGGGAGAUACAUUGG | 1772 | CCAAUGUAUCUCCCACUUU |
| 633 | AAGUGGGAGAUACAUUGGA | 1773 | UCCAAUGUAUCUCCCACUU |
| 634 | AGUGGGAGAUACAUUGGAU | 1774 | AUCCAAUGUAUCUCCCACU |
| 636 | UGGGAGAUACAUUGGAUCU | 1776 | AGAUCCAAUGUAUCUCCCA |
| 642 | AUACAUUGGAUCUUCUCAU | 1782 | AUGAGAAGAUCCAAUGUAU |
| 645 | CAUUGGAUCUUCUCAUUGG | 1785 | CCAAUGAGAAGAUCCAAUG |
| 646 | AUUGGAUCUUCUCAUUGGA | 1786 | UCCAAUGAGAAGAUCCAAU |
| 647 | UUGGAUCUUCUCAUUGGAG | 1787 | CUCCAAUGAGAAGAUCCAA |
| 648 | UGGAUCUUCUCAUUGGAGA | 1788 | UCUCCAAUGAGAAGAUCCA |
| 650 | GAUCUUCUCAUUGGAGAGG | 1790 | CCUCUCCAAUGAGAAGAUC |
| 654 | UUCUCAUUGGAGAGGAUAA | 1794 | UUAUCCUCUCCAAUGAGAA |
| 656 | CUCAUUGGAGAGGAUAAAG | 1796 | CUUUAUCCUCUCCAAUGAG |
| 687 | AGACAGUUAUGCGGAUUCU | 1827 | AGAAUCCGCAUAACUGUCU |
| 688 | GACAGUUAUGCGGAUUCUC | 1828 | GAGAAUCCGCAUAACUGUC |
| 693 | UUAUGCGGAUUCUCUUGAA | 1833 | UUCAAGAGAAUCCGCAUAA |
| 694 | UAUGCGGAUUCUCUUGAAA | 1834 | UUUCAAGAGAAUCCGCAUA |
| 695 | AUGCGGAUUCUCUUGAAAA | 1835 | UUUUCAAGAGAAUCCGCAU |
| 746 | UACAGAGUGGUGUUACGGC | 1886 | GCCGUAACACCACUCUGUA |
| 755 | GUGUUACGGCGGUGGAAAA | 1895 | UUUUCCACCGCCGUAACAC |
| 756 | UGUUACGGCGGUGGAAAAG | 1896 | CUUUUCCACCGCCGUAACA |
| 757 | GUUACGGCGGUGGAAAAGU | 1897 | ACUUUUCCACCGCCGUAAC |
| 758 | UUACGGCGGUGGAAAAGUU | 1898 | AACUUUUCCACCGCCGUAA |
| 759 | UACGGCGGUGGAAAAGUUU | 1899 | AAACUUUUCCACCGCCGUA |
| 761 | CGGCGGUGGAAAAGUUUAA | 1901 | UUAAACUUUUCCACCGCCG |
| 773 | AGUUUAAAGUUGCCUAAGA | 1913 | UCUUAGGCAACUUUAAACU |
| 775 | UUUAAAGUUGCCUAAGAAG | 1915 | CUUCUUAGGCAACUUUAAA |
| 810 | UGGAUUGCUUUUUAGCAAU | 1950 | AUUGCUAAAAAGCAAUCCA |
| 852 | GAAGGGGUCACCUGAAAAA | 1992 | UUUUUCAGGUGACCCCUUC |
| 887 | AAAUAAAGUUCUCUUAGCG | 2027 | CGCUAAGAGAACUUUAUUU |

TABLE 9
Sequences in siRNA subset G

| SEQ | | SEQ | |
|---|---|---|---|
| ID | | ID | |
| NO: | sense strand sequence (5′-3′) | NO: | antisense strand sequence (5′-3′) |
| 2281 | UfsgsGfcUfaUfgGfcUfaGfuGfuUfaAfsusu | 2335 | usUfsaAfcAfcUfaGfcCfaUfaGfcCfasusu |
| 2282 | AfsusCfaUfaCfaAfaCfuCfuGfuAfcAfsusu | 2336 | usGfsuAfcAfgAfgUfuUfgUfaUfgAfususu |
| 2283 | CfsusGfuAfcUfuCfcUfgGfaAfuCfgAfsusu | 2337 | usCfsgAfuUfcCfaGfgAfaGfuAfcAfgsusu |
| 2284 | UfsgsUfaCfuUfcCfuGfgAfaUfcGfaAfsusu | 2338 | usUfscGfaUfuCfcAfgGfaAfgUfaCfasusu |
| 2285 | GfsusAfcUfuCfcUfgGfaAfuCfgAfuAfsusu | 2339 | usAfsuCfgAfuUfcCfaGfgAfaGfuAfcsusu |
| 2286 | UfsasCfuUfcCfuGfgAfaUfcGfaUfaAfsusu | 2340 | usUfsaUfcGfaUfuCfcAfgGfaAfgUfasusu |
| 2287 | CfsusUfcCfuGfgAfaUfcGfaUfaCfuAfsusu | 2341 | usAfsgUfaUfcGfaUfuCfcAfgGfaAfgsusu |
| 2288 | CfsusGfgAfaUfcGfaUfaCfuUfgUfaAfsusu | 2342 | usUfsaCfaAfgUfaUfcGfaUfuCfcAfgsusu |
| 2289 | GfsasAfuCfgAfuAfcUfuGfuAfuUfuAfsusu | 2343 | usAfsaAfuAfcAfaGfuAfuCfgAfuUfcsusu |
| 2290 | CfsusAfgUfaCfcAfaGfuUfaCfgUfgAfsusu | 2344 | usCfsaCfgUfaAfcUfuGfgUfaCfuAfgsusu |
| 2291 | UfsasGfuAfcCfaAfgUfuAfcGfuGfcAfsusu | 2345 | usGfscAfcGfuAfaCfuUfgGfuAfcUfasusu |
| 2292 | AfsgsUfaCfcAfaGfuUfaCfgUfgCfaAfsusu | 2346 | usUfsgCfaCfgUfaAfcUfuGfgUfaCfususu |
| 2293 | GfsusAfcCfaAfgUfuAfcGfuGfcAfcAfsusu | 2347 | usGfsuGfcAfcGfuAfaCfuUfgGfuAfcsusu |
| 2294 | UfsasCfcAfaGfuUfaCfgUfgCfaCfcAfsusu | 2348 | usGfsgUfgCfaCfgUfaAfcUfuGfgUfasusu |
| 2295 | CfscsAfaGfuUfaCfgUfgCfaCfcAfaAfsusu | 2349 | usUfsuGfgUfgCfaCfgUfaAfcUfuGfgsusu |
| 2296 | CfsasAfgUfuAfcGfuGfcAfcCfaAfaAfsusu | 2350 | usUfsuUfgGfuGfcAfcGfuAfaCfuUfgsusu |
| 2297 | AfsasGfuUfaCfgUfgCfaCfcAfaAfuAfsusu | 2351 | usAfsuUfuGfgUfgCfaCfgUfaAfcUfususu |
| 2298 | GfsusUfaCfgUfgCfaCfcAfaAfuUfaAfsusu | 2352 | usUfsaAfuUfuGfgUfgCfaCfgUfaAfcsusu |
| 2299 | UfsusAfcGfuGfcAfcCfaAfaUfuAfuAfsusu | 2353 | usAfsuAfaUfuUfgGfuGfcAfcGfuAfasusu |
| 2300 | AfsasGfaCfuCfaAfaAfgUfaAfuAfuAfsusu | 2354 | usAfsuAfuUfaCfuUfuUfgAfgUfcUfususu |
| 2301 | AfsasAfaUfcUfaCfuAfaAfaAfgUfcAfsusu | 2355 | usGfsaCfuUfuUfuAfgUfaGfaUfuUfususu |
| 2302 | UfscsUfaCfuAfaAfaAfgUfcUfcUfgAfsusu | 2356 | usCfsaGfaGfaCfuUfuUfuAfgUfaGfasusu |
| 2303 | UfsgsAfaGfaCfgGfgGfcUfaGfaUfaAfsusu | 2357 | usUfsaUfcUfaGfcCfcCfgUfcUfuCfasusu |
| 2304 | CfsusAfgAfuAfuUfgGfgAfgAfaAfcAfsusu | 2358 | usGfsuUfuCfuCfcCfaAfuAfuCfuAfgsusu |
| 2305 | AfsgsCfaGfaAfcGfgUfgAfaAfgUfgAfsusu | 2359 | usCfsaCfuUfuCfaCfcGfuUfcUfgCfususu |
| 2306 | AfsasAfgUfgGfgAfgAfuAfcAfuUfgAfsusu | 2360 | usCfsaAfuGfuAfuCfuCfcCfaCfuUfususu |
| 2307 | AfsasGfuGfgGfaGfaUfaCfaUfuGfgAfsusu | 2361 | usCfscAfaUfgUfaUfcUfcCfcAfcUfususu |
| 2308 | AfsgsUfgGfgAfgAfuAfcAfuUfgGfaAfsusu | 2362 | usUfscCfaAfuGfuAfuCfuCfcCfaCfususu |
| 2309 | UfsgsGfgAfgAfuAfcAfuUfgGfaUfcAfsusu | 2363 | usGfsaUfcCfaAfuGfuAfuCfuCfcCfasusu |
| 2310 | AfsusAfcAfuUfgGfaUfcUfuCfuCfaAfsusu | 2364 | usUfsgAfgAfaGfaUfcCfaAfuGfuAfususu |
| 2311 | CfsasUfuGfgAfuCfuUfcUfcAfuUfgAfsusu | 2365 | usCfsaAfuGfaGfaAfgAfuCfcAfaUfgsusu |
| 2312 | AfsusUfgGfaUfcUfuCfuCfaUfuGfgAfsusu | 2366 | usCfscAfaUfgAfgAfaGfaUfcCfaAfususu |
| 2313 | UfsusGfgAfuCfuUfcUfcAfuUfgGfaAfsusu | 2367 | usUfscCfaAfuGfaGfaAfgAfuCfcAfasusu |
| 2314 | UfsgsGfaUfcUfuCfuCfaUfuGfgAfgAfsusu | 2368 | usCfsuCfcAfaUfgAfgAfaGfaUfcCfasusu |
| 2315 | GfsasUfcUfuCfuCfaUfuGfgAfgAfgAfsusu | 2369 | usCfsuCfuCfcAfaUfgAfgAfaGfaUfcsusu |
| 2316 | UfsusCfuCfaUfuGfgAfgAfgGfaUfaAfsusu | 2370 | usUfsaUfcCfuCfuCfcAfaUfgAfgAfasusu |
| 2317 | CfsusCfaUfuGfgAfgAfgGfaUfaAfaAfsusu | 2371 | usUfsuUfaUfcCfuCfuCfcAfaUfgAfgsusu |
| 2318 | AfsgsAfcAfgUfuAfuGfcGfgAfuUfcAfsusu | 2372 | usGfsaAfuCfcGfcAfuAfaCfuGfuCfususu |
| 2319 | GfsasCfaGfuUfaUfgCfgGfaUfuCfuAfsusu | 2373 | usAfsgAfaUfcCfgCfaUfaAfcUfgUfcsusu |
| 2320 | UfsusAfuGfcGfgAfuUfcUfcUfuGfaAfsusu | 2374 | usUfscAfaGfaGfaAfuCfcGfcAfuAfasusu |
| 2321 | UfsasUfgCfgGfaUfuCfuCfuUfgAfaAfsusu | 2375 | usUfsuCfaAfgAfgAfaUfcCfgCfaUfasusu |
| 2322 | AfsusGfcGfgAfuUfcUfcUfuGfaAfaAfsusu | 2376 | usUfsuUfcAfaGfaGfaAfuCfcGfcAfususu |
| 2323 | UfsasCfaGfaGfuGfgUfgUfuAfcGfgAfsusu | 2377 | usCfscGfuAfaCfaCfcAfcUfcUfgUfasusu |
| 2324 | GfsusGfuUfaCfgGfcGfgUfgGfaAfaAfsusu | 2378 | usUfsuUfcCfaCfcGfcCfgUfaAfcAfcsusu |
| 2325 | UfsgsUfuAfcGfgCfgGfuGfgAfaAfaAfsusu | 2379 | usUfsuUfuCfcAfcCfgCfcGfuAfaCfasusu |
| 2326 | GfsusUfaCfgGfcGfgUfgGfaAfaAfgAfsusu | 2380 | usCfsuUfuUfcCfaCfcGfcCfgUfaAfcsusu |
| 2327 | UfsusAfcGfgCfgGfuGfgAfaAfaGfuAfsusu | 2381 | usAfscUfuUfuCfcAfcCfgCfcGfuAfasusu |
| 2328 | UfsasCfgGfcGfgUfgGfaAfaAfgUfuAfsusu | 2382 | usAfsaCfuUfuUfcCfaCfcGfcCfgUfasusu |
| 2329 | CfsgsGfcGfgUfgGfaAfaAfgUfuUfaAfsusu | 2383 | usUfsaAfaCfuUfuUfcCfaCfcGfcCfgsusu |
| 2330 | AfsgsUfuUfaAfaGfuUfgCfcUfaAfgAfsusu | 2384 | usCfsuUfaGfgCfaAfcUfuUfaAfaCfususu |
| 2331 | UfsusUfaAfaGfuUfgCfcUfaAfgAfaAfsusu | 2385 | us UfsuCfuUfaGfgCfaAfcUfuUfaAfasusu |
| 2332 | UfsgsGfaUfuGfcUfuUfuUfaGfcAfaAfsusu | 2386 | usUfsuGfcUfaAfaAfaGfcAfaUfcCfasusu |
| 2333 | GfsasAfgGfgGfuCfaCfcUfgAfaAfaAfsusu | 2387 | usUfsuUfuCfaGfgUfgAfcCfcCfuUfcsusu |
| 2334 | AfsasAfuAfaAfgUfuCfuCfuUfaGfcAfsusu | 2388 | usGfscUfaAfgAfgAfaCfuUfuAfuUfususu |

TABLE 10
Sequences in siRNA subset H

| siRNA | SEQ ID | sense strand | SEQ ID | antisense strand |
|---|---|---|---|---|
| Name | NO: | sequence (5′-3′) | NO: | sequence (5′-3′) |
| ETD01220 | 2389 | usgsgcuAfuGfGfcuaguguu | 2335 | usUfsaAfcAfcUfaGfcCfaUfaGfc |
| | | aasusu | | Cfasusu |
| ETD01221 | 2390 | asuscauAfcAfAfacucugua | 2336 | usGfsuAfcAfgAfgUfuUfgUfaUf |
| | | casusu | | gAfususu |
| ETD01222 | 2391 | csusguaCfuuCfCfuggaauc | 2337 | usCfsgAfuUfcCfaGfgAfaGfuAf |
| | | gasusu | | cAfgsusu |
| ETD01223 | 2392 | usgsuaCfuuCfCfuggaaucg | 2338 | usUfscGfaUfuCfcAfgGfaAfgUf |
| | | aasusu | | aCfasusu |
| ETD01224 | 2393 | gsusacUfUfccUfggaaucga | 2339 | usAfsuCfgAfuUfcCfaGfgAfaGf |
| | | uasusu | | uAfcsusu |
| ETD01225 | 2394 | usascuuccuGfGfaaucgauaa | 2340 | usUfsaUfcGfaUfuCfcAfgGfaAf |
| | | susu | | gUfasusu |
| ETD01226 | 2395 | csusuccuGfGfAfAfucgaua | 2341 | usAfsgUfaUfcGfaUfuCfcAfgGf |
| | | cuasusu | | aAfgsusu |
| ETD01227 | 2396 | csusggAfAfucGfAfuacuug | 2342 | usUfsaCfaAfgUfaUfcGfaUfuCfc |
| | | uaasusu | | Afgsusu |
| ETD01228 | 2397 | gsasaucGfAfuAfcuuguauu | 2343 | usAfsaAfuAfcAfaGfuAfuCfgAf |
| | | uasusu | | uUfcsusu |
| ETD01229 | 2398 | csusaguAfccAfAfguuacgu | 2344 | usCfsaCfgUfaAfcUfuGfgUfaCfu |
| | | gasusu | | Afgsusu |
| ETD01230 | 2399 | usasguAfccAfAfguuacgug | 2345 | usGfscAfcGfuAfaCfuUfgGfuAf |
| | | casusu | | cUfasusu |
| ETD01231 | 2400 | asgsuaccAfaGfuuacgugcaa | 2346 | usUfsgCfaCfgUfaAfcUfuGfgUf |
| | | susu | | aCfususu |
| ETD01232 | 2401 | gsusacCfaagUfUfacgugca | 2347 | usGfsuGfcAfcGfuAfaCfuUfgGf |
| | | casusu | | uAfcsusu |
| ETD01233 | 2402 | usasccaagUfUfaCfgugcacc | 2348 | usGfsgUfgCfaCfgUfaAfcUfuGf |
| | | asusu | | gUfasusu |
| ETD01234 | 2403 | cscsaagUfUfaCfgUfgcacc | 2349 | usUfsuGfgUfgCfaCfgUfaAfcUf |
| | | aaasusu | | uGfgsusu |
| ETD01235 | 2404 | csasaguuAfcGfuGfcaccaaa | 2350 | usUfsuUfgGfuGfcAfcGfuAfaCf |
| | | asusu | | uUfgsusu |
| ETD01236 | 2405 | asasguUfaCfgUfgCfaccaa | 2351 | usAfsuUfuGfgUfgCfaCfgUfaAf |
| | | auasusu | | cUfususu |
| ETD01237 | 2406 | gsusuaCfgugCfaCfcaaauu | 2352 | usUfsaAfuUfuGfgUfgCfaCfgUf |
| | | aasusu | | aAfcsusu |
| ETD01238 | 2407 | ususacGfuGfcAfccaaauua | 2353 | usAfsuAfaUfuUfgGfuGfcAfcGf |
| | | uasusu | | uAfasusu |
| ETD01239 | 2408 | asasgacucAfAfAfAfguaau | 2354 | usAfsuAfuUfaCfuUfuUfgAfgUf |
| | | auasusu | | cUfususu |
| ETD01240 | 2409 | asasaaUfCfuaCfUfaaaaagu | 2355 | usGfsaCfuUfuUfuAfgUfaGfaUf |
| | | casusu | | uUfususu |
| ETD01241 | 2410 | uscsuacuAfAfAfAfAfgucu | 2356 | usCfsaGfaGfaCfuUfuUfuAfgUf |
| | | cugasusu | | aGfasusu |
| ETD01242 | 2411 | usgsaaGfacGfGfGfGfcuag | 2357 | usUfsaUfcUfaGfcCfcCfgUfcUfu |
| | | auaasusu | | Cfasusu |
| ETD01243 | 2412 | csusagaUfaUfUfgggagaaa | 2358 | usGfsuUfuCfuCfcCfaAfuAfuCf |
| | | casusu | | uAfgsusu |
| ETD01244 | 2413 | asgscaGfaacGfGfugaaagu | 2359 | usCfsaCfuUfuCfaCfcGfuUfcUfg |
| | | gasusu | | Cfususu |
| ETD01245 | 2414 | asasaguGfggAfgAfuacauu | 2360 | usCfsaAfuGfuAfuCfuCfcCfaCfu |
| | | gasusu | | Ufususu |
| ETD01246 | 2415 | asasguGfgGfaGfauacauug | 2361 | usCfscAfaUfgUfaUfcUfcCfcAfc |
| | | gasusu | | Ufususu |
| ETD01247 | 2416 | asgsugggAfgAfuAfcauugg | 2362 | usUfscCfaAfuGfuAfuCfuCfcCfa |
| | | aasusu | | Cfususu |
| ETD01248 | 2417 | usgsggAfgAfuAfcAfuugg | 2363 | usGfsaUfcCfaAfuGfuAfuCfuCfc |
| | | aucasusu | | Cfasusu |
| ETD01249 | 2418 | asusac AfuuGfGfaucuucuc | 2364 | usUfsgAfgAfaGfaUfcCfaAfuGf |
| | | aasusu | | uAfususu |
| ETD01250 | 2419 | csasuuggaUfCfUfUfcucau | 2365 | usCfsaAfuGfaGfaAfgAfuCfcAfa |
| | | ugasusu | | Ufgsusu |
| ETD01251 | 2420 | asusuggaUfcUfUfcucauug | 2366 | usCfscAfaUfgAfgAfaGfaUfcCfa |
| | | gasusu | | Afususu |
| ETD01252 | 2421 | ususggaUfcUfUfcUfcauug | 2367 | usUfscCfaAfuGfaGfaAfgAfuCfc |
| | | gaasusu | | Afasusu |
| ETD01253 | 2422 | usgsgauCfuuCfuCfauugga | 2368 | usCfsuCfcAfaUfgAfgAfaGfaUfc |
| | | gasusu | | Cfasusu |
| ETD01254 | 2423 | gsasucUfuCfuCfauuggaga | 2369 | usCfsuCfuCfcAfaUfgAfgAfaGfa |
| | | gasusu | | Ufcsusu |
| ETD01255 | 2424 | ususcucAfuuGfGfagaggau | 2370 | usUfsaUfcCfuCfuCfcAfaUfgAfg |
| | | aasusu | | Afasusu |
| ETD01256 | 2425 | csuscauuGfGfAfGfAfggau | 2371 | usUfsuUfaUfcCfuCfuCfcAfaUfg |
| | | aaaasusu | | Afgsusu |
| ETD01257 | 2426 | asgsacAfGfuuAfuGfcggau | 2372 | usGfsaAfuCfcGfcAfuAfaCfuGf |
| | | ucasusu | | uCfususu |
| ETD01258 | 2427 | gsascagUfUfaUfgcggauuc | 2373 | usAfsgAfaUfcCfgCfaUfaAfcUfg |
| | | uasusu | | Ufcsusu |
| ETD01259 | 2428 | ususauGfcGfgAfuucucuug | 2374 | usUfscAfaGfaGfaAfuCfcGfcAfu |
| | | aasusu | | Afasusu |
| ETD01260 | 2429 | usasugCfggaUfUfcucuuga | 2375 | usUfsuCfaAfgAfgAfaUfcCfgCfa |
| | | aasusu | | Ufasusu |
| ETD01261 | 2430 | asusgcggaUfUfcUfcuugaa | 2376 | usUfsuUfcAfaGfaGfaAfuCfcGfc |
| | | aasusu | | Afususu |
| ETD01262 | 2431 | usascaGfaGfuGfGfuguuac | 2377 | usCfscGfuAfaCfaCfcAfcUfcUfg |
| | | ggasusu | | Ufasusu |
| ETD01263 | 2432 | gsusguuacGfGfcGfguggaa | 2378 | usUfsuUfcCfaCfcGfcCfgUfaAfc |
| | | aasusu | | Afcsusu |
| ETD01264 | 2433 | usgsuuaCfggCfgguggaaaa | 2379 | usUfsuUfuCfcAfcCfgCfcGfuAfa |
| | | asusu | | Cfasusu |
| ETD01265 | 2434 | gsusuacGfGfcGfGfuggaaa | 2380 | usCfsuUfuUfcCfaCfcGfcCfgUfa |
| | | agasusu | | Afcsusu |
| ETD01266 | 2435 | ususacGfGfcGfGfuGfgaaa | 2381 | usAfscUfuUfuCfcAfcCfgCfcGfu |
| | | aguasusu | | Afasusu |
| ETD01267 | 2436 | usascggCfggUfggaaaaguu | 2382 | usAfsaCfuUfuUfcCfaCfcGfcCfg |
| | | asusu | | Ufasusu |
| ETD01268 | 2437 | csgsgcGfGfuGfGfaaaaguu | 2383 | usUfsaAfaCfuUfuUfcCfaCfcGfc |
| | | uaasusu | | Cfgsusu |
| ETD01269 | 2438 | asgsuuuAfAfAfGfuugccua | 2384 | usCfsuUfaGfgCfaAfcUfuUfaAfa |
| | | agasusu | | Cfususu |
| ETD01270 | 2439 | ususuaaagUfUfgCfcuaaga | 2385 | usUfsuCfuUfaGfgCfaAfcUfuUf |
| | | aasusu | | aAfasusu |
| ETD01271 | 2440 | usgsgaUfUfgcUfuUfuuagc | 2386 | usUfsuGfcUfaAfaAfaGfcAfaUfc |
| | | aaasusu | | Cfasusu |
| ETD01272 | 2441 | gsasaggggUfCfaCfcugaaa | 2387 | usUfsuUfuCfaGfgUfgAfcCfcCf |
| | | aasusu | | uUfcsusu |
| ETD01273 | 2334 | AfsasAfuAfaAfgUfuCfuC | 2388 | usGfscUfaAfgAfgAfaCfuUfuAf |
| | | fuUfaGfcAfsusu | | uUfususu |

[0475] Any siRNA among any of subsets A-H may comprise any modification pattern described herein. If a sequence is a different number of nucleotides in length than a modification pattern, the modification pattern may still be used with the appropriate number of additional nucleotides added 5′ or 3′ to match the number of nucleotides in the modification pattern. For example, if a sense or antisense strand of the siRNA among any of subsets A-F comprises 19 nucleotides, and a modification pattern comprises 21 nucleotides, UU may be added onto the 5′ end of the sense or antisense strand.

### Example 3: Screening MTRES1 siRNAs for Activity in Human Cells in Culture

[0476] Chemically modified MTRES1 siRNAs in Table 10 were assayed for MTRES1 mRNA knockdown activity in cells in culture. SK-LMS-1 cells (ATCC® HTB-88) were seeded in 96-well tissue culture plates at a cell density of 7,500 cells per well in EMEM (ATCC Catalog No. 30-2003) supplemented with 10% fetal bovine serum and incubated overnight in a water-jacketed, humidified incubator at 37° C. in an atmosphere composed of air plus 5% carbon dioxide. These siRNAs were derived from sequences in siRNA subset F, and were cross reactive for human and non-human primate. The MTRES1 siRNAs were individually transfected into SK-LMS-1 cells in duplicate wells at 10 nM and 1 nM final concentration using 0.3 μL Lipofectamine RNAiMax (Fisher) per well. Silencer Select Negative Control #1 (ThermoFisher, Catalog #4390843) was transfected at 10 nM and 1 nM final concentration as a control. Silencer Select human MTRES1 (ThermoFisher, Catalog #4427037, ID: s27762) was transfected at 10 nM and 1 nM final concentration and used as a positive control. After incubation for 48 hours at 37° C., total RNA was harvested from each well and cDNA prepared using TaqMan® Fast Advanced Cells-to-CT™ Kit (ThermoFisher, Catalog #A35374) according to the manufacturer's instructions. The level of MTRES1 mRNA from each well was measured in triplicate by real-time qPCR on a QuantStudio™ 6 Pro Real-Time PCR System using TaqMan Gene Expression Assay for human MTRES1 (ThermoFisher, assay #Hs00360684_m1). The level of PPIA mRNA was measured using TaqMan Gene Expression Assay (ThermoFisher, assay #Hs99999904_m1) and used to determine relative MTRES1 mRNA levels in each well using the delta-delta Ct method. All data was normalized to relative MTRES1 mRNA levels in untreated SK-LMS-1 cells. The results are shown in Table 11. The siRNAs ETD01228, ETD01270, ETD01251, ETD01235, ETD01249, ETD01258, ETD01268, ETD01273, ETD01263, ETD01240, ETD01223, ETD01262, ETD01239, ETD01242, ETD01272, ETD01220, ETD01261, ETD01243, ETD01269, ETD01256, ETD01241, ETD01238, ETD01247 and ETD01266 reduced MTRES1 levels by greater than 50% when transfected at 10 nM.

TABLE 11
Knockdown Activity of MTRES1-Specific siRNAs
at 10 nM and 1 nM in Human SK-LMS-1 Cells

| | | Antisense | | |
|---|---|---|---|---|
| | Sense Strand | Strand | Relative MTRES1 | |
| siRNA name | SEQ ID NO: | SEQ ID NO: | mRNA Level | |
| Untreated Cells | — | — | 1.00 | |
| | | | 10 nM | 1 nM |
| | | | siRNA | siRNA |
| Negative Control | — | — | 0.93 | 1.34 |
| siRNA | | | | |
| Positive Control | — | — | 0.39 | 0.80 |
| siRNA | | | | |
| ETD01220 | 2389 | 2335 | 0.34 | 0.87 |
| ETD01221 | 2390 | 2336 | 0.73 | 1.24 |
| ETD01222 | 2391 | 2337 | 1.03 | 1.18 |
| ETD01223 | 2392 | 2338 | 0.39 | 0.57 |
| ETD01224 | 2393 | 2339 | 0.62 | 0.86 |
| ETD01225 | 2394 | 2340 | 1.13 | 1.10 |
| ETD01226 | 2395 | 2341 | 0.50 | 0.69 |
| ETD01227 | 2396 | 2342 | 1.10 | 1.21 |
| ETD01228 | 2397 | 2343 | 0.50 | 0.68 |
| ETD01229 | 2398 | 2344 | 0.52 | 0.96 |
| ETD01230 | 2399 | 2345 | 1.01 | 1.14 |
| ETD01231 | 2400 | 2346 | 0.52 | 1.00 |
| ETD01232 | 2401 | 2347 | 0.78 | 1.01 |
| ETD01233 | 2402 | 2348 | 0.79 | 1.11 |
| ETD01234 | 2403 | 2349 | 0.81 | 0.92 |
| ETD01235 | 2404 | 2350 | 0.44 | 0.75 |
| ETD01236 | 2405 | 2351 | 0.87 | 1.04 |
| ETD01237 | 2406 | 2352 | 0.57 | 0.83 |
| ETD01238 | 2407 | 2353 | 0.28 | 0.49 |
| ETD01239 | 2408 | 2354 | 0.38 | 0.76 |
| ETD01240 | 2409 | 2355 | 0.41 | 0.81 |
| ETD01241 | 2410 | 2356 | 0.29 | 0.59 |
| ETD01242 | 2411 | 2357 | 0.37 | 0.61 |
| ETD01243 | 2412 | 2358 | 0.32 | 0.83 |
| ETD01244 | 2413 | 2359 | 1.00 | 1.15 |
| ETD01245 | 2414 | 2360 | 0.98 | 1.04 |
| ETD01246 | 2415 | 2361 | 0.85 | 1.05 |
| ETD01247 | 2416 | 2362 | 0.26 | 0.52 |
| ETD01248 | 2417 | 2363 | 0.92 | 1.04 |
| ETD01249 | 2418 | 2364 | 0.44 | 0.78 |
| ETD01250 | 2419 | 2365 | 1.04 | 1.10 |
| ETD01251 | 2420 | 2366 | 0.47 | 0.94 |
| ETD01252 | 2421 | 2367 | 0.83 | 1.17 |
| ETD01253 | 2422 | 2368 | 0.87 | 1.04 |
| ETD01254 | 2423 | 2369 | 0.92 | 1.02 |
| ETD01255 | 2424 | 2370 | 0.84 | 1.03 |
| ETD01256 | 2425 | 2371 | 0.29 | 0.57 |
| ETD01257 | 2426 | 2372 | 0.75 | 1.00 |
| ETD01258 | 2427 | 2373 | 0.44 | 0.93 |
| ETD01259 | 2428 | 2374 | 0.55 | 1.00 |
| ETD01260 | 2429 | 2375 | 0.66 | 1.33 |
| ETD01261 | 2430 | 2376 | 0.33 | 0.53 |
| ETD01262 | 2431 | 2377 | 0.39 | 0.92 |
| ETD01263 | 2432 | 2378 | 0.42 | 0.76 |
| ETD01264 | 2433 | 2379 | 1.00 | 1.28 |
| ETD01265 | 2434 | 2380 | 1.00 | 0.94 |
| ETD01266 | 2435 | 2381 | 0.24 | 0.36 |
| ETD01267 | 2436 | 2382 | 0.90 | 1.14 |
| ETD01268 | 2437 | 2383 | 0.44 | 1.06 |
| ETD01269 | 2438 | 2384 | 0.32 | 0.90 |
| ETD01270 | 2439 | 2385 | 0.50 | 0.91 |
| ETD01271 | 2440 | 2386 | 0.52 | 1.15 |
| ETD01272 | 2441 | 2387 | 0.35 | 0.90 |
| ETD01273 | 2442 | 2388 | 0.44 | 1.24 |

### Example 4: Determining the IC50 of MTRES1 siRNAs

[0477] The IC50 values for knockdown of MTRES1 mRNA by select MTRES1 siRNAs will be determined in SK-LMS-1 (ATCCR HTB-88) cells. The siRNAs will be assayed individually at 30 nM, 10 nM, 3 nM, 1 nM and 0.3 nM, or 3 nM, 1 nM, 0.3 nM, 0.1 nM and 0.03 nM, or 30 nM, 10 nM, 3 nM, 1 nM, 0.3 nM, 0.1 nM and 0.03 nM. The SK-LMS-1 cells will be seeded in 96-well tissue culture plates at a cell density of 7,500 cells per well in EMEM (ATCC Catalog No. 30-2003) supplemented with 10% fetal bovine serum and incubated overnight in a water-jacketed, humidified incubator at 37° C. in an atmosphere composed of air plus 5% carbon dioxide. The MTRES1 siRNAs will be individually transfected into SK-LMS-1 cells in triplicate wells using 0.3 μL Lipofectamine RNAiMax (Fisher) per well. After incubation for 48 hours at 37° C., total RNA will be harvested from each well and cDNA prepared using TaqMan® Fast Advanced Cells-to-CT™ Kit (ThermoFisher, Catalog #A35374) according to the manufacturer's instructions. The level of MTRES1 mRNA from each well will be measured in triplicate by real-time qPCR on a QuantStudio™ 6 Pro Real-Time PCR System using TaqMan Gene Expression Assay for human MTRES1 (ThermoFisher, assay #Hs01568158_m1). The level of PPIA mRNA will be measured using TaqMan Gene Expression Assay (ThermoFisher, assay #Hs99999904_m1) and used to determine relative MTRES1 mRNA levels in each well using the delta-delta Ct method. All data will be normalized to relative MTRES1 mRNA levels in untreated SK-LMS-1 cells. Curve fit will be accomplish using the [inhibitor]vs. response (three parameters) function in GraphPad Prism software.

### Example 5: SiRNA-Mediated Knockdown of MTRES1 in HCN-2 Cells

[0478] siRNAs targeted to MTRES1 mRNA that downregulate levels of MTRES1 mRNA may lead to a decrease in mRNA abundance of mitochondrially expressed NADH-ubiquinone oxidoreductase chain 5 protein (ND5), NADH-ubiquinone oxidoreductase chain 6 protein (ND6), cytochrome b (CYTB), and mitochondrially encoded 12S ribosomal RNA (12S rRNA), when administered to the cultured human neuronal cell line HCN-2 under conditions of ethidium bromide induced mitochondrial stress.

[0479] On Day 0, HCN-2 cells are to be seeded at 150,000 cells/mL into a Falcon 24-well tissue culture plate (ThermoFisher Cat. No. 353047) at 0.5 mL per well.

[0480] On Day 1, cells are treated with ethidium bromide (100 ng/ml), a well-established mitochondrial DNA replication/transcription inhibitor and stressor. Also on Day 1, MTRES1 siRNA and negative control siRNA master mixes are prepared. The MTRES1 siRNA master mix contains 350 μL of Opti-MEM (ThermoFisher Cat. No. 4427037-s1288 Lot No. AS02B02D) and 3.5 μL of a mixture of two MTRES1 siRNAs (10 μM stock). The negative control siRNA master mix contains 350 μL of Opti-MEM and 3.5 μL of negative control siRNA (ThermoFisher Cat. No. 4390843, 10 μM stock). Next, 3 μL of TransIT-X2 (Mirus Cat. No. MIR-6000) is added to each master mix. The mixes are incubated for 15 minutes to allow transfection complexes to form, then 51 μL of the appropriate master mix+TransIT-X2 is added to duplicate wells of HCN-2 cells with a final siRNA concentration of 10 nM.

[0481] On Day 3, 48 hours post transfection, duplicate wells are lysed using the Cells-to-Ct kit according to the manufacturer's protocol (ThermoFisher Cat. No. 4399002) or protein lysis buffer containing protease and phosphatase inhibitors. For the Cells-to-Ct, cells are washed with 50 μL using cold 1×PBS and lysed by adding 49.5 μL of Lysis Solution and 0.5 μL DNase I per well and pipetting up and down 5 times and incubating for 5 minutes at room temperature. Stop Solution (5 μL/well) is added to each well and mixed by pipetting up and down five times and incubating at room temperature for 2 minutes. The reverse transcriptase reaction is performed using 22.5 μL of the lysate according to the manufacturer's protocol. Samples are stored at −80° C. until real-time qPCR is performed in triplicate using TaqMan Gene Expression Assays (Applied Biosystems FAM/MTRES1, FAM/ND5, FAM/ND6, FAM/CYTB and FAM/12srRNA and using a BioRad CFX96 Cat. No. 1855195).

[0482] A decrease in MTRES1 mRNA expression in the HCN-2 cells is expected after transfection with the MTRES1 siRNAs compared to MTRES1 mRNA levels in HCN-2 cells transfected with the non-specific control siRNA 48 hours after transfection. There is an expected decrease in abundance of mitochondrial expressed genes ND5, ND6, CYTB and 12s rRNA mRNA. These results will show that the MTRES1 siRNAs elicit knockdown of MTRES1 mRNA in HCN-2 cells, and that the decrease in MTRES1 expression is correlated with a decrease in abundance of mitochondrial expressed genes ND5, ND6, CYTB and 12s rRNA mRNA.

### Example 6: ASO-Mediated Knockdown of MTRES1 in HCN-2 Cells

[0483] ASOs targeted to MTRES1 mRNA that downregulate levels of MTRES1 mRNA may lead to a decrease in mRNA abundance of mitochondrial expressed ND5, ND6, CYTB and 12s rRNA, when administered to the cultured human neuronal cell line HCN-2 under conditions of ethidium bromide induced mitochondrial stress.

[0484] On Day 0, HCN-2 cells are to be seeded at 150,000 cells/mL into a Falcon 24-well tissue culture plate (ThermoFisher Cat. No. 353047) at 0.5 mL per well.

[0485] On Day 1, cells are treated with ethidium bromide (100 ng/ml), a well-established mitochondrial DNA replication/transcription inhibitor and stressor. Also on Day 1, MTRES1 ASO and negative control ASO master mixes are prepared. The MTRES1 ASO master mix contains 350 μL of Opti-MEM (ThermoFisher Cat. No. 4427037-s1288 Lot No. AS02B02D) and 3.5 μL of a mixture of two MTRES1 ASOs (10 μM stock). The negative control ASO master mix contains 350 μL of Opti-MEM and 3.5 μL of negative control ASO (ThermoFisher Cat. No. 4390843, 10 μM stock). Next, 3 μL of TransIT-X2 (Mirus Cat. No. MIR-6000) is added to each master mix. The mixes are incubated for 15 minutes to allow transfection complexes to form, then 51 μL of the appropriate master mix+TransIT-X2 is added to duplicate wells of HCN-2 cells with a final ASO concentration of 10 nM.

[0486] On Day 3, 48 hours post transfection, duplicate wells are lysed using the Cells-to-Ct kit according to the manufacturer's protocol (ThermoFisher Cat. No. 4399002) or protein lysis buffer containing protease and phosphatase inhibitors. For the Cells-to-Ct, cells are washed with 50 μL using cold 1×PBS and lysed by adding 49.5 μL of Lysis Solution and 0.5 μL DNase I per well and pipetting up and down 5 times and incubating for 5 minutes at room temperature. Stop Solution (5 μL/well) is added to each well and mixed by pipetting up and down five times and incubating at room temperature for 2 minutes. The reverse transcriptase reaction is performed using 22.5 μL of the lysate according to the manufacturer's protocol. Samples are stored at −80° C. until real-time qPCR is performed in triplicate using TaqMan Gene Expression Assays (Applied Biosystems FAM/MTRES1, FAM/ND5, FAM/ND6, FAM/CYTB and FAM/12srRNA and using a BioRad CFX96 Cat. No. 1855195).

[0487] A decrease in MTRES1 mRNA expression in the HCN-2 cells is expected after transfection with the MTRES1 ASOs compared to MTRES1 mRNA levels in HCN-2 cells transfected with the non-specific control ASO 48 hours after transfection. There is an expected decrease in abundance of mitochondrial expressed genes ND5, ND6, CYTB and 12s rRNA mRNA. These results will show that the MTRES1 ASOs elicit knockdown of MTRES1 mRNA in HCN-2 cells, and that the decrease in MTRES1 expression is correlated with a decrease in abundance of mitochondrial expressed genes ND5, ND6, CYTB and 12s rRNA mRNA.

### Example 7: Modulation of MTRES1 in a Mouse Model for Alzheimer's Disease Using MTRES1 siRNAs

[0488] In this experiment, a mouse model of Alzheimer's Disease (AD) will be used to evaluate effects of the siRNAs described herein that target MTRES1. In some embodiments, the siRNA comprises one or more of SEQ ID NOS: 2675, 2677-2686, 2689, 2720, 2729, 2739, 2745, 2748, 2749, 2754, 2758-2762, 2766, 2767, 2769, 2770, 2786, 2787-2812, 2814-2816, 2819-2822, 2824, 2828-2833, 2836, 2838, 2839, 2857, 2859-2868, 2871, 2873, 2874, 2877-2879, 2940-2944, 2948-2952, 2968-2994, 2996-2998, 3001-3004, 3006, 3010, 3011, 3013-3015, 3018, and 3020. The model includes 5×FAD (Tg6799) mice which express human amyloid beta precursor protein (APP) and presenilin-1 (PSEN1) transgenes with five AD-linked mutations. Cognitive function is measured using a Barnes maze (BM) test and novel object recognition test (NORT).

[0489] Three-month-old mice are divided into two groups: Group 1—a group treated with the siRNA targeting MTRES1, Group 2—a group treated with vehicle.

[0490] Mice are administered the siRNA or the vehicle by intracerebroventricular injection on day 0 of treatment. Mice are induced to anesthetic states in an induction chamber with 1.2% isoflurane vaporized by oxygen of 1.0 L/min and then transferred and fixed to a stereotaxic frame while keeping anesthetized by 0.8% isoflurane through a mask. The skulls are exposed and single intracerebroventricular injections (5 μL, artificial cerebrospinal fluid as vehicle) are performed at 500 nL min⁻¹ after needle placement at the following coordinates from bregma: −0.2 mm anterior-posterior, 0.8 mm mediolateral and −2.5 mm dorsoventral using a Standard U-Frame Stereotaxic Instrument for Mouse (Harvard Apparatus 75-1808) and a Stereotaxic Anesthesia Adapters with Anesthesia Masks (Harvard Apparatus 75-1856). Dosing for each group will be repeated on day 180 of treatment following the same procedures.

[0491] The behavioral tests are performed on day 180 and day 360 of treatment, when the mice are 9 and 15 months old, respectively. To rule out nonspecific motor effects that could influence the results, the potential effect of treatment on locomotor activity is assessed. Mice are evaluated using the openfield apparatus (40×40×30 cm) in a sound-attenuated room. The total distance (cm) traveled by each mouse is recorded for 5 min by a video tracking system (ANY-maze; Stoelting Co., Wood Dale, IL) and is used to quantify activity levels. The floor of the open-field apparatus is cleaned with 70% ethanol between tests.

[0492] The novel object recognition test based on the spontaneous tendency of rodents to spend more time exploring a novel object than a familiar one. Exploration of the novel object reflects the use of learning and recognition memory. On the first day of testing, animals are first placed in a novel object apparatus (40×40×30 cm) and allowed to explore two identical objects for a period of 5 mins. Time spent investigating each object is recorded by video tracking system. After a 24 hr. interval, the animal is returned to the novel object apparatus, which contains the familiar object and a novel object and allowed to explore for 5-mins and time spent investigating each object is recorded by video tracking system. Object recognition in cognitively intact animals is distinguished by more time spent interacting with the novel object and calculated as [(novel object investigation time)/(total investigation time of both objects)*100]. This metric can be used to compare memory retention of treated versus control animals.

[0493] The Barnes maze is behavioral test useful for screening potential drugs that influence cognition and assessing other manipulations that are expected to affect cognitive related behaviors. The task measures these parameters by observing the ability of the subject to remember the location of the target hole leading to an enclosed escape chamber. The testing maze is constructed of matte white Plexiglas circle (92 cm diameter) with 20 holes equally spaced around the perimeter (5 cm hole diameter) at a height of 95 cm. During the habituation trail (Day 1:3 mins.), the animal is initially placed in the center of the maze under a starting cup or covered area. After a predetermined period, the cup is lifted, and the animal is allowed to explore the maze and find the escape box. The animal's speed, path length, latency to find the escape box and number of errors (visiting incorrect holes) is recorded (ANY-maze; Stoelting Co., Wood Dale, IL). The acquisition phase consists of four sessions per day for four consecutive days (Days 2-4) with an inter-trial-interval of 20 mins. During each session, the animal's speed, path length, latency to find the escape box and number of errors (visiting incorrect holes) is recorded (ANY-maze; Stoelting Co., Wood Dale, IL). With continued trials, shorter latencies, and path distance to reach an escape box are expected because in order to resolve the maze. 24 hrs. after the final acquisition trial, a 2 min. probe trial is performed where the target hole is closed, and the time spend on the vicinity of the previously correct hole (or the correct zone) is measured.

[0494] Twenty-four hours after behavioral assessment, all animals will be anesthetized with isoflurane to effect and CSF will be collected (followed by thoracotomy), and the samples will be centrifuged for 10 min at +4° C. and transferred to a sterile tubes. CSF will be snap frozen in liquid nitrogen. Following CSF collection blood will be collected and processed to serum. Brains and spinal cord are removed, and brain hemispheres separated along the midline. Brain halves are either flash frozen and stored at −80° C. until processing for subsequent biochemical analysis or drop-fixed in 10% neutral-buffered formalin.

[0495] Amyloid burden is assessed using 5-nm-thick sections from Formalin fixed paraffin embedded (FFPE) tissue are deparaffinized with xylene and rehydrated using a gradient of alcohol. Next, heat-induced antigen retrieval is carried out on sections. Sections are blocked at room temperature (RT) before primary antibodies (AB) are diluted and incubated overnight at RT in a humid chamber. Secondary antibody treatment is performed by incubation with fluorescent-labeled antibodies. Amyloid burden is acquired by measuring the total number of Aβ plaques and their size, expressed in area units (nm2) in the brain area analyzed in an individual section. The immunopositive signal (AB plaques) within the selected brain region is identified by a threshold level mask, which is maintained throughout the whole analysis per timeframe for uniformity. Then, the total number of amyloid plaques and their area is obtained.

[0496] For measurement of neurofilament-light (NF-L) levels in terminal serum samples, the NF-Light Serum ELISA (UmanDiagnostics) is used without modifications. Samples are diluted 1:2.5-1:10 in assay buffer and analyzed using 50 μl per sample according to the manufacturer's protocol.

[0497] Measurements of AB42 and AB40 concentrations in serum and tissue extracts is measured using the MILLIPLEX® MAP Mouse Amyloid Beta Magnetic Bead Panel (Millipore) without modifications according to manufacturer's protocol. Data is acquired and analyzed on a Luminex instrument according to specifications outlined by the manufacturer.

[0498] Total RNA is extracted from homogenized tissue and reverse transcribed to cDNA using a First-Strand III cDNA Synthesis kit. Normalized cDNA quantification is carried out by real-time TaqMan PCR using fluorescently labeled TaqMan assays for mouse MTRES1 (ThermoFisher, assay #Mm01229834_m1) and the mouse housekeeping gene PPIA (ThermoFisher, assay #Mm02342430_g1) . . . . Reactions are carried out in 20 μL aliquots using TaqMan Universal PCR Master Mix No AmpErase UNG ran on an ABI Prism 7500 Fast Real-Time PCR System Sequence Detection System and analyzed by the 7500 System software. Relative Quantification (RQ) values between treated and untreated samples are calculated by the formula 2-AACT, where CT is the cycle at threshold (automatic measurement), ΔCT is CT of the assayed gene (MTRES1) minus CT of the endogenous control (PPIA), and AACT is the ΔCT of the normalized assayed gene in the treated sample minus the ΔCT of the same gene in the untreated one (calibrator).

[0499] A decrease in MTRES1 mRNA expression in the brain and spinal cord tissues from mice dosed with the MTRES1 siRNA is expected compared to MTRES1 mRNA levels in the brain and spinal cord tissues from mice dosed with vehicle. Shorter latencies, and path distance to reach an escape box are expected in the Barnes maze test in mice that receive the MTRES1 siRNA compared to mice that receive vehicle. Compared to mice that receive vehicle, mice that receive MTRES1 siRNA are expected to more time spent interacting with the novel object in the novel object recognition test. No change is expected between treatment groups in the locomotor activity test. These results will show that the MTRES1 siRNAs elicit knockdown of MTRES1 mRNA in brain and spinal cord tissues, and that the decrease in MTRES1 expression is correlated with better performance in behavioral assessments that measure cognitive function as well as decreased amyloid burden and Aβ pathology. Neurofilament-light (NF-L) concentration in serum is increased and associated with disease progression in the 5×FAD mice receiving vehicle, but mice treated with MTRES1 siRNA are expected to have lower NF-L levels in comparison. These results will indicate that administration of an siRNA targeting MTRES1 to a mammalian subject may be used to treat neurological disorder that includes cognitive decline.

### Example 8: Screening siRNAs Targeting Human and Mouse MTRES1 in Mice

[0500] Several siRNAs designed to be cross-reactive with human and mouse MTRES1 mRNA were tested for activity in mice. The siRNAs were attached to the GalNAc ligand ETL1. The siRNA sequences are shown in Table 12A, where Nf is a 2′-fluoro-modified nucleoside, n is a 2′-O-methyl modified nucleoside, and “s” is a phosphorothioate linkage.

[0501] Six- to eight-week-old female mice (strain ICR, n=3) were given a subcutaneous injection on Day 0 of a single 200 μg dose of a GalNAc-conjugated siRNA or PBS as vehicle control.

[0502] Mice were euthanized on Day 14 after injection and a liver sample from each was collected and placed in RNAlater (ThermoFisher Catalog #AM7020) until processing. Total liver RNA was prepared by homogenizing the liver tissue in homogenization buffer (Maxwell RSC simplyRNA Tissue Kit) using a Percellys 24 tissue homogenizer (Bertin Instruments) set at 5000 rpm for two 10 second cycles. Total RNA from the lysate was purified on a Maxwell RSC 48 platform (Promega Corporation) according to the manufacturer's recommendations. Preparation of cDNA was performed using Quanta qScript cDNA SuperMix (VWR, Catalog #95048-500) according to the manufacturer's instructions. The relative levels of liver MTRES1 mRNA were assessed by RT-qPCR in triplicate on a QuantStudio™ 6 Pro Real-Time PCR System using TaqMan assays for mouse MTRES1 (ThermoFisher, assay #Mm01229834_m1) and the mouse housekeeping gene PPIA (ThermoFisher, assay #Mm02342430_g1) and PerfeCTa® qPCR FastMix®, Low ROX™ (VWR, Catalog #101419-222). Data were normalized to the mean MTRES1 mRNA level in animals receiving PBS. Results are shown in Table 13. Mice injected with ETD01506, ETD01507, ETD01508, and ETD01509 had substantially lower levels in mean liver MTRES1 mRNA on Day 14 relative to mice receiving PBS.

TABLE 12A
Description of Example siRNAs with Sequences

| | Sense | | Antisense | |
|---|---|---|---|---|
| | Strand | | Strand | |
| siRNA | SEQ ID | Sense Strand Sequence | SEQ ID | Antisense Strand |
| Name | NO: | (5′-3′) with GalNAc moiety | NO: | Sequence (5′-3′) |
| ETD01506 | 2463 | [ETL1]UfscsgaUfaCfuUfgUfaUf | 2467 | usGfsaAfaAfaUfaCfaAfgUfaUf |
| | | uUfuUfcasusu | | cGfasusu |
| ETD01507 | 2464 | [ETL1]csusAfcAfaAfgGfuGfaA | 2468 | usCfsugaGfuUfcaccuUfuGfuag |
| | | fcucAfgAfsusu | | susu |
| ETD01508 | 2465 | [ETL1]AfsusGfgAfaGfaAfaAfg | 2469 | usGfsuucUfgCfuuuucUfuCfcau |
| | | caGfaAfcAfsusu | | susu |
| ETD01509 | 2466 | [ETL1]csusuucuAfcAfaAfgGfu | 2470 | usGfsuUfcAfcCfuUfuGfuAfgA |
| | | GfaAfcAfsusu | | faAfgsusu |

TABLE 12B
Example siRNA Base Sequences

| | SEQ | Sense Strand Base | SEQ | |
|---|---|---|---|---|
| siRNA | ID | Sequence (5′ to 3′) | ID | Antisense Strand Base |
| Name | NO: | | NO: | Sequence (5′ to 3′) |
| ETD01506 | 2550 | UCGAUACUUGUAUUUUUCAUU | 2612 | UGAAAAAUACAAGUAUCGAUU |
| ETD01507 | 2551 | CUACAAAGGUGAACUCAGAUU | 2613 | UCUGAGUUCACCUUUGUAGUU |
| ETD01508 | 2552 | AUGGAAGAAAAGCAGAACAUU | 2614 | UGUUCUGCUUUUCUUCCAUUU |
| ETD01509 | 2553 | CUUUCUACAAAGGUGAACAUU | 2615 | UGUUCACCUUUGUAGAAAGUU |
| | SEQ | Sense Strand Base | SEQ | Antisense Strand Base |
| siRNA | ID | Sequence (5′ to 3′), | ID | Sequence (5′ to 3′), |
| Name | NO: | without 3′ overhangs | NO: | without 3′ overhangs |
| ETD01506 | 2554 | UCGAUACUUGUAUUUUUCA | 2616 | UGAAAAAUACAAGUAUCGA |
| ETD01507 | 2555 | CUACAAAGGUGAACUCAGA | 2617 | UCUGAGUUCACCUUUGUAG |
| ETD01508 | 2556 | AUGGAAGAAAAGCAGAACA | 2618 | UGUUCUGCUUUUCUUCCAU |
| ETD01509 | 2557 | CUUUCUACAAAGGUGAACA | 2619 | UGUUCACCUUUGUAGAAAG |

TABLE 13
Relative MTRES1 mRNA Levels in Livers of Mice

| | | | Dose | Mean MTRES1 mRNA (Normalized |
|---|---|---|---|---|
| Group | n | Treatment | (ug) | to Group 1, Day 14) |
| 1 | 3 | PBS | 0 | 1.00 |
| 2 | 3 | ETD01506 | 200 | 0.27 |
| 3 | 3 | ETD01507 | 200 | 0.00 |
| 4 | 3 | ETD01508 | 200 | 0.51 |
| 5 | 3 | ETD01509 | 200 | 0.51 |

### Example 9: Screening of siRNAs Targeting Human MTRES1 mRNA in Mice Transfected with AAV8-TBG-h-MTRES1

[0503] Several siRNAs designed to be cross-reactive with human and cynomolgus monkey MTRES1 mRNA were tested for activity in mice following transfection with an adeno-associated viral vector. The siRNAs were attached to the GalNAc ligand ETL17. The siRNA sequences are shown in Table 14A, where “Nf” is a 2′-fluoro-modified nucleoside, “n” is a 2′-O-methyl modified nucleoside, “d” is a deoxynucleoside, and “s” is a phosphorothioate linkage.

[0504] Six- to eight-week-old female mice (C57Bl/6) were injected with 10 μL of a recombinant adeno-associated virus 8 (AAV8) vector (8.8×10E12 genome copies/mL) by the retroorbital route on Day-13. The recombinant AAV8 contained the open reading frame and the majority of the 3′UTR of the human MTRES1 sequence (NM_016487.5) under the control of the human thyroxine binding globulin promoter in an AAV2 backbone packaged in AAV8 capsid (AAV8-TBG-h-MTRES1). On Day 0, infected mice (n=4) were given a subcutaneous injection of a single 100 μg dose of a GalNAc-conjugated siRNA or PBS as vehicle control.

[0505] Mice were euthanized on Day 10 after subcutaneous injection and a liver sample from each was collected and placed in RNAlater (ThermoFisher Catalog #AM7020) until processing. Total liver RNA was prepared by homogenizing the liver tissue in homogenization buffer (Maxwell RSC simplyRNA Tissue Kit) using a Percellys 24 tissue homogenizer (Bertin Instruments) set at 5000 rpm for two 10 second cycles. Total RNA from the lysate was purified on a Maxwell RSC 48 platform (Promega Corporation) according to the manufacturer's recommendations. Preparation of cDNA was performed using Quanta qScript cDNA SuperMix (VWR, Catalog #95048-500) according to the manufacturer's instructions. The relative levels of liver MTRES1 mRNA were assessed by RT-qPCR in triplicate on a QuantStudio™ 6 Pro Real-Time PCR System using TaqMan assays for human MTRES1 (ThermoFisher, assay #Hs01568158_g1) and the mouse housekeeping gene PPIA (ThermoFisher, assay #Mm02342430_g1) and PerfeCTa® qPCR FastMix®, Low ROX™ (VWR, Catalog #101419-222). Data were normalized to the mean MTRES1 mRNA level in animals receiving PBS. Results are shown in Table 15. Mice injected with ETD01880, 1886, 1887, 1888, 1893 had greatest reductions in mean liver MTRES1 mRNA on Day 10 relative to mice receiving PBS.

TABLE 14A
Example siRNA Sequences

| | | | Anti- | |
|---|---|---|---|---|
| | Sense | | sense | |
| | Strand | Sense Strand | Strand | |
| siRNA | SEQ ID | Sequence (5′-3′) | SEQ | Antisense Strand |
| Name | NO: | with GalNAc moiety | ID NO: | Sequence (5′-3′) |
| ETD01879 | 2471 | [ETL17]suacaaaCfUfCfU | 2488 | usGfsgAfaGfuAfcAfgAfg |
| | | fguacuuccasusu | | UfuUfgUfasusu |
| ETD01880 | 2472 | [ETL17]suguaCfUfUfCfC | 2489 | usUfscGfaUfuCfcAfgGfa |
| | | fuggaaucgaasusu | | AfgUfaCfasusu |
| ETD01881 | 2473 | [ETL17]suacuUfcCfUfdG | 2490 | usUfsaUfcGfaUfuCfcAfg |
| | | gaaucgauaasusu | | GfaAfgUfasusu |
| ETD01882 | 2474 | [ETL17]sgaaucGfAfuAfc | 2491 | usAfsaAfuAfcAfaGfuAfu |
| | | uuguauuuasusu | | CfgAfuUfcsusu |
| ETD01883 | 2475 | [ETL17]suucuagUfaCfCf | 2492 | usCfsgUfaAfcUfuGfgUfa |
| | | aaguuacgasusu | | CfuAfgAfasusu |
| ETD01884 | 2476 | [ETL17]saguuAfcGfuGfc | 2493 | usAfsaUfuUfgGfuGfcAfc |
| | | Afccaaauuasusu | | GfuAfaCfususu |
| ETD01885 | 2477 | [ETL17]suuacGfuGfcAfc | 2494 | usAfsuAfaUfuUfgGfuGfc |
| | | caaauuauasusu | | AfcGfuAfasusu |
| ETD01886 | 2478 | [ETL17]saaaaUfCfuaCfU | 2495 | usGfsaCfuUfuUfuAfgUfa |
| | | faaaaagucasusu | | GfaUfuUfususu |
| ETD01887 | 2479 | [ETL17]saucuAfcuAfAfA | 2496 | usAfsgAfgAfcUfuUfuUfa |
| | | fAfagucucuasusu | | GfuAfgAfususu |
| ETD01888 | 2480 | [ETL17]scuagaUfaUfUfg | 2497 | usGfsuUfuCfuCfcCfaAfu |
| | | ggagaaacasusu | | AfuCfuAfgsusu |
| ETD01889 | 2481 | [ETL17]scauuggaUfCfUf | 2498 | usCfsaAfuGfaGfaAfgAfu |
| | | Ufcucauugasusu | | CfcAfaUfgsusu |
| ETD01890 | 2482 | [ETL17]suuggaUfCfUfUf | 2499 | usUfscCfaAfuGfaGfaAfg |
| | | Cfucauuggaasusu | | AfuCfcAfasusu |
| ETD01891 | 2483 | [ETL17]sauacAfgAfGfdT | 2500 | usCfsgUfaAfcAfcCfaCfu |
| | | gguguuacgasusu | | CfuGfuAfususu |
| ETD01892 | 2484 | [ETL17]saguuuAfAfAfGf | 2501 | usCfsuUfaGfgCfaAfcUfu |
| | | uugccuaagasusu | | UfaAfaCfususu |
| ETD01893 | 2485 | [ETL17]suuuaaagUfUfgC | 2502 | usUfsuCfuUfaGfgCfaAfc |
| | | fcuaagaaasusu | | UfuUfaAfasusu |
| ETD01894 | 2486 | [ETL17]suggaUfUfgCfUf | 2503 | usUfsuGfcUfaAfaAfaGfc |
| | | uUfuuagcaaasusu | | AfaUfcCfasusu |
| ETD01895 | 2487 | [ETL17]saaauAfaAfGfdT | 2504 | usGfscUfaAfgAfgAfaCfu |
| | | ucucuuagcasusu | | UfuAfuUfususu |

TABLE 14B
Example siRNA Base Sequences

| siRNA | SEQ ID | Sense Strand Base | SEQ ID | Antisense Strand Base |
|---|---|---|---|---|
| Name | NO: | Sequence (5′ to 3′) | NO: | Sequence (5′ to 3′) |
| ETD01879 | 2558 | UACAAACUCUGUACUUCCAUU | 2620 | UGGAAGUACAGAGUUUGUAUU |
| ETD01880 | 2559 | UGUACUUCCUGGAAUCGAAUU | 2621 | UUCGAUUCCAGGAAGUACAUU |
| ETD01881 | 2560 | UACUUCCUGGAAUCGAUAAUU | 2622 | UUAUCGAUUCCAGGAAGUAUU |
| ETD01882 | 2561 | GAAUCGAUACUUGUAUUUAUU | 2623 | UAAAUACAAGUAUCGAUUCUU |
| ETD01883 | 2562 | UUCUAGUACCAAGUUACGAUU | 2624 | UCGUAACUUGGUACUAGAAUU |
| ETD01884 | 2563 | AGUUACGUGCACCAAAUUAUU | 2625 | UAAUUUGGUGCACGUAACUUU |
| ETD01885 | 2564 | UUACGUGCACCAAAUUAUAUU | 2626 | UAUAAUUUGGUGCACGUAAUU |
| ETD01886 | 2565 | AAAAUCUACUAAAAAGUCAUU | 2627 | UGACUUUUUAGUAGAUUUUUU |
| ETD01887 | 2566 | AUCUACUAAAAAGUCUCUAUU | 2628 | UAGAGACUUUUUAGUAGAUUU |
| ETD01888 | 2567 | CUAGAUAUUGGGAGAAACAUU | 2629 | UGUUUCUCCCAAUAUCUAGUU |
| ETD01889 | 2568 | CAUUGGAUCUUCUCAUUGAUU | 2630 | UCAAUGAGAAGAUCCAAUGUU |
| ETD01890 | 2569 | UUGGAUCUUCUCAUUGGAAUU | 2631 | UUCCAAUGAGAAGAUCCAAUU |
| ETD01891 | 2570 | AUACAGAGTGGUGUUACGAUU | 2632 | UCGUAACACCACUCUGUAUUU |
| ETD01892 | 2571 | AGUUUAAAGUUGCCUAAGAUU | 2633 | UCUUAGGCAACUUUAAACUUU |
| ETD01893 | 2572 | UUUAAAGUUGCCUAAGAAAUU | 2634 | UUUCUUAGGCAACUUUAAAUU |
| ETD01894 | 2573 | UGGAUUGCUUUUUAGCAAAUU | 2635 | UUUGCUAAAAAGCAAUCCAUU |
| ETD01895 | 2574 | AAAUAAAGTUCUCUUAGCAUU | 2636 | UGCUAAGAGAACUUUAUUUUU |
| | | Sense Strand Base | | Antisense Strand Base |
| siRNA | SEQ ID | Sequence (5′ to 3′), | SEQ ID | Sequence (5′ to 3′), |
| Name | NO: | without 3′ overhangs | NO: | without 3′ overhangs |
| ETD01879 | 2575 | UACAAACUCUGUACUUCCA | 2637 | UGGAAGUACAGAGUUUGUA |
| ETD01880 | 2576 | UGUACUUCCUGGAAUCGAA | 2638 | UUCGAUUCCAGGAAGUACA |
| ETD01881 | 2577 | UACUUCCUGGAAUCGAUAA | 2639 | UUAUCGAUUCCAGGAAGUA |
| ETD01882 | 2578 | GAAUCGAUACUUGUAUUUA | 2640 | UAAAUACAAGUAUCGAUUC |
| ETD01883 | 2579 | UUCUAGUACCAAGUUACGA | 2641 | UCGUAACUUGGUACUAGAA |
| ETD01884 | 2580 | AGUUACGUGCACCAAAUUA | 2642 | UAAUUUGGUGCACGUAACU |
| ETD01885 | 2581 | UUACGUGCACCAAAUUAUA | 2643 | UAUAAUUUGGUGCACGUAA |
| ETD01886 | 2582 | AAAAUCUACUAAAAAGUCA | 2644 | UGACUUUUUAGUAGAUUUU |
| ETD01887 | 2583 | AUCUACUAAAAAGUCUCUA | 2645 | UAGAGACUUUUUAGUAGAU |
| ETD01888 | 2584 | CUAGAUAUUGGGAGAAACA | 2646 | UGUUUCUCCCAAUAUCUAG |
| ETD01889 | 2585 | CAUUGGAUCUUCUCAUUGA | 2647 | UCAAUGAGAAGAUCCAAUG |
| ETD01890 | 2586 | UUGGAUCUUCUCAUUGGAA | 2648 | UUCCAAUGAGAAGAUCCAA |
| ETD01891 | 2587 | AUACAGAGTGGUGUUACGA | 2649 | UCGUAACACCACUCUGUAU |
| ETD01892 | 2588 | AGUUUAAAGUUGCCUAAGA | 2650 | UCUUAGGCAACUUUAAACU |
| ETD01893 | 2589 | UUUAAAGUUGCCUAAGAAA | 2651 | UUUCUUAGGCAACUUUAAA |
| ETD01894 | 2590 | UGGAUUGCUUUUUAGCAAA | 2652 | UUUGCUAAAAAGCAAUCCA |
| ETD01895 | 2591 | AAAUAAAGTUCUCUUAGCA | 2653 | UGCUAAGAGAACUUUAUUU |

### Table 15. Relative Human MTRES1 mRNA Levels in Livers of Mice

TABLE 15
Relative human MTRES1 mRNA Levels in Livers of Mice

| | | | Dose | Mean MTRES1 mRNA (Normalized |
|---|---|---|---|---|
| Group | n | Treatment | (ug) | to Group 1, Day 10) |
| 1 | 4 | PBS | 0 | 1.00 |
| 2 | 4 | ETD01879 | 100 | 0.70 |
| 3 | 4 | ETD01880 | 100 | 0.45 |
| 4 | 4 | ETD01881 | 100 | 0.78 |
| 5 | 4 | ETD01882 | 100 | 2.07 |
| 6 | 4 | ETD01883 | 100 | 1.24 |
| 7 | 4 | ETD01884 | 100 | 1.12 |
| 8 | 4 | ETD01885 | 100 | 0.97 |
| 9 | 4 | ETD01886 | 100 | 0.46 |
| 10 | 4 | ETD01887 | 100 | 0.18 |
| 11 | 4 | ETD01888 | 100 | 0.14 |
| 12 | 4 | ETD01889 | 100 | 0.74 |
| 13 | 4 | ETD01890 | 100 | 1.73 |
| 14 | 4 | ETD01891 | 100 | 3.21 |
| 15 | 4 | ETD01892 | 100 | 2.59 |
| 16 | 4 | ETD01893 | 100 | 0.55 |
| 17 | 4 | ETD01894 | 100 | 1.12 |
| 18 | 4 | ETD01895 | 100 | 0.65 |

### Example 10: Screening siRNAs Targeting Human and Mouse MTRES1 in Mice

[0506] Several siRNAs designed to be cross-reactive with human, mouse and cynomolgus monkey MTRES1 mRNA were tested for activity in mice. The siRNAs were attached to the GalNAc ligand ETL1 or ETL17. The siRNA sequences are shown in Table 16A, where Nf is a 2′-fluoro-modified nucleoside, n is a 2′-O-methyl modified nucleoside, “d” is a deoxynucleoside, and “s” is a phosphorothioate linkage.

[0507] Six- to eight-week-old female mice (strain ICR, n=3) were given a subcutaneous injection on Day 0 of a single 200 μg dose of a GalNAc-conjugated siRNA or PBS as vehicle control.

[0508] Mice were euthanized on Day 10 after injection and a liver sample from each was collected and placed in RNAlater (ThermoFisher Catalog #AM7020) until processing. Total liver RNA was prepared by homogenizing the liver tissue in homogenization buffer (Maxwell RSC simplyRNA Tissue Kit) using a Percellys 24 tissue homogenizer (Bertin Instruments) set at 5000 rpm for two 10 second cycles. Total RNA from the lysate was purified on a Maxwell RSC 48 platform (Promega Corporation) according to the manufacturer's recommendations. Preparation of cDNA was performed using Quanta qScript cDNA SuperMix (VWR, Catalog #95048-500) according to the manufacturer's instructions. The relative levels of liver MTRES1 mRNA were assessed by RT-qPCR in triplicate on a QuantStudio™ 6 Pro Real-Time PCR System using TaqMan assays for mouse MTRES1 (ThermoFisher, assay #Mm01229834_m1) and the mouse housekeeping gene PPIA (ThermoFisher, assay #Mm02342430_g1) and PerfeCTa® qPCR FastMix®, Low ROX™ (VWR, Catalog #101419-222). Data were normalized to the mean MTRES1 mRNA level in animals receiving PBS. Results are shown in

TABLE 17
Mice injected with ETD01597, ETD01955, ETD01958,
and had substantially lower levels in mean liver
MTRESI mRNA on Day 10 relative to mice receiving PBS.
Table 16A. Example siRNA Sequences

| | Sense | | Antisense | |
|---|---|---|---|---|
| | Strand | Sense Strand | Strand | |
| siRNA | SEQ ID | Sequence (5′-3′) | SEQ | Antisense Strand |
| Name | NO: | with GalNAc moiety | ID NO: | Sequence (5′-3′) |
| ETD01597 | 2505 | [ETL1]sguaucuccAfgAfaug | 2515 | usAfsuAfaCfaUfuCfuGfgAf |
| | | uuauasusu | | gAfuAfcsusu |
| ETD01954 | 2506 | [ETL17] sacuuccuGfGfAfA | 2516 | usGfsuAfsuCfgAfuUfcCfaG |
| | | fucgauacasusu | | fgAfaGfususu |
| ETD01955 | 2507 | [ETL17] scuuccuGfGfAfAf | 2517 | usAfsgUfaUfcGfaUfuCfcAf |
| | | ucgauacuasusu | | gGfaAfgsusu |
| ETD01956 | 2508 | [ETL17]scuggAfAfucGfAf | 2518 | usUfsaCfaAfgUfaUfcGfaUf |
| | | uacuuguaasusu | | uCfcAfgsusu |
| ETD01957 | 2509 | [ETL17]sggaa UfCfgaUfaCf | 2519 | usAfsaUfaCfaAfgUfaUfcGf |
| | | uuguauuasusu | | aUfuCfcsusu |
| ETD01958 | 2510 | [ETL17] sgaugCfUfuUfCfu | 2520 | usAfscCfuUfuGfuAfgAfaAf |
| | | acaaagguasusu | | gCfaUfcsusu |
| ETD01959 | 2511 | [ETL17]sagaaAfAfgcAfGf | 2521 | usUfscAfcCfgUfuCfuGfcUf |
| | | aacggugaasusu | | uUfuCfususu |
| ETD01960 | 2512 | [ETL17] saagcagAfAfdCGf | 2522 | usAfscUfuUfcAfcCfgUfuCf |
| | | gugaaaguasusu | | uGfcUfususu |
| ETD01961 | 2513 | [ETL17] sagugGfGfaGfAfu | 2523 | usUfscCfaAfuGfuAfuCfuCf |
| | | Afcauuggaasusu | | cCfaCfususu |
| ETD01962 | 2514 | [ETL17]suggg AfGfauAfcA | 2524 | usGfsaUfcCfaAfuGfuAfuCf |
| | | fuuggaucasusu | | uCfcCfasusu |

TABLE 16B
Example siRNA Base Sequences

| | SEQ | | SEQ | |
|---|---|---|---|---|
| siRNA | ID | Sense Strand Base | ID | Antisense Strand Base |
| Name | NO: | Sequence (5′ to 3′) | NO: | Sequence (5′ to 3′) |
| ETD01597 | 2592 | GUAUCUCCAGAAUGUUAUAUU | 2654 | UAUAACAUUCUGGAGAUACUU |
| ETD01954 | 2593 | ACUUCCUGGAAUCGAUACAUU | 2655 | UGUAUCGAUUCCAGGAAGUUU |
| ETD01955 | 2594 | CUUCCUGGAAUCGAUACUAUU | 2656 | UAGUAUCGAUUCCAGGAAGUU |
| ETD01956 | 2595 | CUGGAAUCGAUACUUGUAAUU | 2657 | UUACAAGUAUCGAUUCCAGUU |
| ETD01957 | 2596 | GGAAUCGAUACUUGUAUUAUU | 2658 | UAAUACAAGUAUCGAUUCCUU |
| ETD01958 | 2597 | GAUGCUUUCUACAAAGGUAUU | 2659 | UACCUUUGUAGAAAGCAUCUU |
| ETD01959 | 2598 | AGAAAAGCAGAACGGUGAAUU | 2660 | UUCACCGUUCUGCUUUUCUUU |
| ETD01960 | 2599 | AAGCAGAACGGUGAAAGUAUU | 2661 | UACUUUCACCGUUCUGCUUUU |
| ETD01961 | 2600 | AGUGGGAGAUACAUUGGAAUU | 2662 | UUCCAAUGUAUCUCCCACUUU |
| ETD01962 | 2601 | UGGGAGAUACAUUGGAUCAUU | 2663 | UGAUCCAAUGUAUCUCCCAUU |
| | SEQ | Sense Strand Base | SEQ | Antisense Strand Base |
| siRNA | ID | Sequence (5′ to 3′), | ID | Sequence (5′ to 3′), |
| Name | NO: | without 3′ overhangs | NO: | without 3′ overhangs |
| ETD01597 | 2602 | GUAUCUCCAGAAUGUUAUA | 2664 | UAUAACAUUCUGGAGAUAC |
| ETD01954 | 2603 | ACUUCCUGGAAUCGAUACA | 2665 | UGUAUCGAUUCCAGGAAGU |
| ETD01955 | 2604 | CUUCCUGGAAUCGAUACUA | 2666 | UAGUAUCGAUUCCAGGAAG |
| ETD01956 | 2605 | CUGGAAUCGAUACUUGUAA | 2667 | UUACAAGUAUCGAUUCCAG |
| ETD01957 | 2606 | GGAAUCGAUACUUGUAUUA | 2668 | UAAUACAAGUAUCGAUUCC |
| ETD01958 | 2607 | GAUGCUUUCUACAAAGGUA | 2669 | UACCUUUGUAGAAAGCAUC |
| ETD01959 | 2608 | AGAAAAGCAGAACGGUGAA | 2670 | UUCACCGUUCUGCUUUUCU |
| ETD01960 | 2609 | AAGCAGAACGGUGAAAGUA | 2671 | UACUUUCACCGUUCUGCUU |
| ETD01961 | 2610 | AGUGGGAGAUACAUUGGAA | 2672 | UUCCAAUGUAUCUCCCACU |
| ETD01962 | 2611 | UGGGAGAUACAUUGGAUCA | 2673 | UGAUCCAAUGUAUCUCCCA |

TABLE 17
Relative MTRES1 mRNA Levels in Livers of Mice

| | | | Dose | Mean MTRES1 mRNA (Normalized |
|---|---|---|---|---|
| Group | n | Treatment | (ug) | to Group 1, Day 10) |
| 1 | 3 | PBS | | 1.00 |
| 2 | 3 | ETD01597 | 200 | 0.13 |
| 3 | 3 | ETD01954 | 200 | 1.03 |
| 4 | 3 | ETD01955 | 200 | 0.16 |
| 5 | 3 | ETD01956 | 200 | 0.62 |
| 6 | 3 | ETD01957 | 200 | 0.31 |
| 7 | 3 | ETD01958 | 200 | 0.18 |
| 8 | 3 | ETD01959 | 200 | 0.53 |
| 9 | 3 | ETD01960 | 200 | 0.69 |
| 10 | 3 | ETD01961 | 200 | 0.33 |
| 11 | 3 | ETD01962 | 200 | 0.79 |

### Example 11: Minigene Constructs Expressing Protective Variants in MTRES1 Result in a Reduction of MTRES1 mRNA and MTRES1 Protein

[0509] Minigene expression constructs encoding for wild type and rs117058816 (c.3+1G>A) MTRES1 proteins were generated. Minigene constructs (<10 kb) are easier to synthesize and have greater transfection efficiency in downstream experiments than constructs that exceed 10 kb in length. The minigene constructs have a portion of internal, intronic sequence removed, but retain all exons and UTRs. Therefore, the pre-mRNA of the exons, reduced introns, and 5′ and 3′ UTRs of the protein coding transcript (ENST00000625458) of MTRES1 was cloned into a pcDNA3.1 (+) vector driven by a CMV promoter. Empty vector was used as control. For rs117058816 expression constructs, the A allele replaced the G allele at DNA sequence position chr6: 107030108 (human genome build 38). This leads to the loss of a splice donor site (c.3+1G>A).

[0510] Transfections of HEK-293 cells were optimized. HEK-293 cells were plated in a 6-well plate in complete growth media and grown for 48 hours followed by a media change. Cells were then transfected with 2 μg of plasmid DNA and 7 μl of TransIT-2020. Cells were incubated for 48 hours, and then harvested.

[0511] Cell lysates from transfected cells were assayed to evaluate intracellular MTRES1 protein by western blot (FIG. 1A). In empty vector transfected HEK-293 cells, a faint band representing endogenous MTRES1 expression was detected by western blot as a band at 24 kDa. In cells transfected with the wild type construct, significant expression of MTRES1 was detected by western blot as a band 24 kDa. In cells transfected with the rs117058816 construct, reduced MTRES1 protein compared with wild type was detected by western blot as a band between 24 kDa. When normalizing to total protein, cells transfected with the rs117058816 construct express approximately 75% less MTRES1 protein compared with cells transfected with the wild type construct (FIG. 1B).

[0512] Cell lysates from transfected cells were also assayed to evaluate MTRES1 mRNA by qPCR. Cells transfected with the rs117058816 construct express approximately 70% less MTRES1 mRNA compared with cells transfected with the wild type construct (FIG. 2).

[0513] These data provide experimental verification that MTRES1 gene variants associated with protection from dementia and Alzheimer's disease result in a change or loss of MTRES1 protein and MTRES1 mRNA abundance or function. Accordingly, in some cases therapeutic inhibition or modulation of MTRES1 may be an effective genetically-informed method of treatment for these diseases.

### Example 12: CRISPR-Engineered Cell Lines Expressing Protective Variants in MTRES1 Result in a Reduction of MTRES1 mRNA and MTRES1 Protein

[0514] Sanger-verified CRISPR cell lines on a HEK-293 clonal background were generated including (i) a rs117058816-A (c.3+1A) homozygous knock-in (KI), a homozygous knock-out (KO) and a mock-transfected wild type (WT) cell line.

[0515] Cells were grown, fractionated and whole cell lysates and mitochondrial fractions harvested

[0516] Whole cell and mitochondrial fraction lysates from CRISPR cell lines were assayed to evaluate intracellular MTRES1 protein by western blot (FIG. 3). In WT cells, significant MTRES1 expression was detected by western blot as a band at 24 kDa in both whole cell lysates and mitochondrial fractions. In CRISPR KI cells, reduced MTRES1 protein compared with WT was detected by western blot in both whole cell lysates and mitochondrial fractions. In CRISPR KO cells, no MTRES1 protein was detected by western blot in either whole cell lysates or mitochondrial fractions.

[0517] Whole cell lysates from CRISPR cell lines were also assayed to evaluate MTRES1 mRNA by qPCR (FIG. 4). In CRISPR KI cells, approximately 70% less MTRES1 mRNA expression is observed compared with cells transfected with the wild type construct. In CRISPR KO cells, no MTRES1 mRNA expression was detected by qPCR.

[0518] These data provide further experimental verification that MTRES1 gene variants associated with protection from dementia and Alzheimer's disease result in loss of MTRES1 protein and MTRES1 mRNA abundance or function. Accordingly, in some cases therapeutic inhibition or modulation of MTRES1 may be an effective genetically-informed method of treatment for these diseases.

### Example 13: Oligonucleotide Synthesis

[0519] Oligonucleotides such as siRNAs may be synthesized according to phosphoramidite technology on a solid phase. For example, a K&A oligonucleotide synthesizer may be used. Syntheses may be performed on a solid support made of controlled pore glass (CPG, 500 Å or 600 Å, obtained from AM Chemicals, Oceanside, CA, USA). All 2′-OMe and 2′-F phosphoramidites may be purchased from Hongene Biotech (Union City, CA, USA). All phosphoramidites may be dissolved in anhydrous acetonitrile (100 mM) and molecular sieves (3 Å) may be added. 5-Benzylthio-1H-tetrazole (BTT, 250 mM in acetonitrile) or 5-Ethylthio-1H-tetrazole (ETT, 250 mM in acetonitrile) may be used as activator solution. Coupling times may be 9-18 min (e.g. with a GalNAc such as ETL17), 6 min (e.g. with 2′OMe and 2′F). In order to introduce phosphorothioate linkages, a 100 mM solution of 3-phenyl 1,2,4-dithiazoline-5-one (POS, obtained from PolyOrg, Inc., Leominster, Mass., USA) in anhydrous acetonitrile may be employed.

[0520] After solid phase synthesis, the dried solid support may be treated with a 1:1 volume solution of 40 wt. % methylamine in water and 28% ammonium hydroxide solution (Aldrich) for two hours at 30° C. The solution may be evaporated, and the solid residue may be reconstituted in water and purified by anionic exchange HPLC using a TKSgel SuperQ-5 PW 13u column. Buffer A may be 20 mM Tris, 5 mM EDTA, pH 9.0 and contained 20% Acetonitrile and buffer B may be the same as buffer A with the addition of 1 M sodium chloride. UV traces at 260 nm may be recorded. Appropriate fractions may be pooled then desalted using Sephadex G-25 medium.

[0521] Equimolar amounts of sense and antisense strand may be combined to prepare a duplex. The duplex solution may be prepared in 0.1×PBS (Phosphate-Buffered Saline, 1×, Gibco). The duplex solution may be annealed at 95° C. for 5 min, and cooled to room temperature slowly. Duplex concentration may be determined by measuring the solution absorbance on a UV-Vis spectrometer at 260 nm in 0.1×PBS. For some experiments, a conversion factor may be calculated from an experimentally determined extinction coefficient.

### Example 14: GalNAc Ligand for Hepatocyte Targeting of Oligonucleotides

[0522] Without limiting the disclosure to these individual methods, there are at least two general methods for attachment of multivalent N-acetylgalactosamine (GalNAc) ligands to oligonucleotides: solid or solution-phase conjugations. GalNAc ligands may be attached to solid phase resin for 3′ conjugation or at the 5′ terminus using GalNAc phosphoramidite reagents. GalNAc phosphoramidites may be coupled on solid phase as for other nucleosides in the oligonucleotide sequence at any position in the sequence. Reagents for GalNAc conjugation to oligonucleotides are shown in Table 18.

TABLE 18
GalNAc Conjugation Reagents

| Type of conjugation | Structure |
|---|---|
| Solid phase 3′ attachment where squiggly line is the rest of oligonucleotide chain and right-most OH is where attachment to solid phase is. | [chemical structure] |
| | This GalNAc ligand may be referred to as “GalNAc23” or “GalNAc#23.” |
| Solid phase 5′ attachment phosphoramidite | [chemical structure] |
| Solid phase 5′ attachment Phosphoramidite | [chemical structure] |
| Solution phase Carboxylic acid for amide coupling anywhere on oligonucleotide | [chemical structure] |
| | Where Ac is an acetyl group or other hydroxyl protecting group that can be removed |
| | under basic, acid or reducing conditions. |

[0523] In solution phase conjugation, the oligonucleotide sequence-including a reactive conjugation site—is formed on the resin. The oligonucleotide is then removed from the resin and GalNAc is conjugated to the reactive site.

[0524] The carboxy GalNAc derivatives may be coupled to amino-modified oligonucleotides. The peptide coupling conditions are known to the skilled in the art using a carbodiimide coupling agent like DCC (N,N′-Dicyclohexylcarbodiimide), EDC (N-(3-dimethylaminopropyl)-N′-ethylcarbodiimide) or EDC.HCl (N-(3-dimethylaminopropyl)-N′-ethylcarbodiimide hydrochloride and an additive like HOBt (1-hydroxybenztriazole), HOSu (N-hydroxysuccinimide), TBTU (N,N,N′,N′-Tetramethyl-O-(benzotriazol-1-yl) uronium tetrafluoroborate, HBTU (2-(1H-benzotriazol-1-yl)-1,1,3,3-tetramethyluronium hexafluorophosphate) or HOAt (1-Hydroxy-7-azabenzotriazole and common combinations thereof such as TBTU/HOBt or HBTU/HOAt to form activated amine-reactive esters.

[0525] Amine groups may be incorporated into oligonucleotides using a number of known, commercially available reagents at the 5′ terminus, 3′ terminus or anywhere in between.

[0526] Non-limiting examples of reagents for oligonucleotide synthesis to incorporate an amino group include:
[0527] 5′ attachment:
[0528] 6-(4-Monomethoxytritylamino) hexyl-(2-cyanoethyl)-(N,N-diisopropyl)-phosphoramidite CAS Number: 114616-27-2
[0529] 5′-Amino-Modifier TEG CE-Phosphoramidite
[0530] 10-(O-trifluoroacetamido-N-ethyl)-triethyleneglycol-1-[(2-cyanoethyl)-(N,N-diisopropyl)]-phosphoramidite
[0531] 3′ attachment:
[0532] 3′-Amino-Modifier Serinol CPG
[0533] 3-Dimethoxytrityloxy-2-(3-(fluorenylmethoxycarbonylamino) propanamido) propyl-1-O-succinyl-long chain alkylamino-CPG (where CPG stands for controlled-pore glass and is the solid support)· Amino-Modifier Serinol Phosphoramidite
[0534] 3-Dimethoxytrityloxy-2-(3-(fluorenylmethoxycarbonylamino) propanamido) propyl-1-O-(2-cyanoethyl)-(N,N-diisopropyl)-phosphoramidite

### Internal (Base Modified):

[0535] Amino-Modifier C6 dT
[0536] 5′-Dimethoxytrityl-5-[N-(trifluoroacetylaminohexyl)-3-acrylimido]-2′-deoxyUridine,3′-[(2-cyanoethyl)-(N,N-diisopropyl)]-phosphoramidite. CAS Number: 178925-21-8

[0537] Solution phase conjugations may occur after oligonucleotide synthesis via reactions between non-nucleosidic nucleophilic functional groups that are attached to the oligonucleotide and electrophilic GalNAc reagents. Examples of nucleophilic groups include amines and thiols, and examples of electrophilic reagents include activated esters (e.g. N-hydroxysuccinimide, pentafluorophenyl) and maleimides.

### Example 15: GalNAc Ligands for Hepatocyte Targeting of Oligonucleotides

[0538] Without limiting the disclosure to these individual methods, there are at least two general methods for attachment of multivalent N-acetylgalactosamine (GalNAc) ligands to oligonucleotides: solid or solution-phase conjugations. GalNAc ligands may be attached to solid phase resin for 3′ conjugation or at the 5′ terminus using GalNAc phosphoramidite reagents. GalNAc phosphoramidites may be coupled on solid phase as for other nucleosides in the oligonucleotide sequence at any position in the sequence. A non-limiting example of a phosphoramidite reagent for GalNAc conjugation to a 5′ end oligonucleotide is shown in Table 19.

TABLE 19
GalNAc Conjugation Reagent

| Type of | |
|---|---|
| conjugation | Structure |
| Solid phase 5′ attachment phos- phoramidite | [chemical structure] |

[0539] The following includes examples of synthesis reactions used to create a GalNAc moiety:

### Scheme for the Preparation of NAcegal-Linker-TMSOTf

[chemical structure]

### General Procedure for Preparation of Compound 2A

[chemical structure]

[0540] To a solution of Compound 1A (500 g, 4.76 mol, 476 mL) in 2-Methly-THF (2.00 L) is added CbzCl (406 g, 2.38 mol, 338 mL) in 2-Methyl-THF (750 mL) dropwise at 0° C. The mixture is stirred at 25° C. for 2 hours under N₂ atmosphere. TLC (DCM:MeOH=20:1, PMA) may indicate CbzCl is consumed completely and one new spot (R_{f}=0.43) formed. The reaction mixture is added HCl/EtOAc (1 N, 180 mL) and stirred for 30 mins, white solid is removed by filtration through celite, the filtrate is concentrated under vacuum to give Compound 2A (540 g, 2.26 mol, 47.5% yield) as a pale-yellow oil and used into the next step without further purification. ¹H NMR: δ 7.28-7.41 (m, 5H), 5.55 (br s, 1H), 5.01-5.22 (m, 2H), 3.63-3.80 (m, 2H), 3.46-3.59 (m, 4H), 3.29-3.44 (m, 2H), 2.83-3.02 (m, 1H).

### General Procedure for Preparation of Compound 4A

[chemical structure]

[0541] To a solution of Compound 3A (1.00 kg, 4.64 mol, HCl) in pyridine (5.00 L) is added acetyl acetate (4.73 kg, 46.4 mol, 4.34 L) dropwise at 0° C. under N₂ atmosphere. The mixture is stirred at 25° C. for 16 hrs under N₂ atmosphere. TLC (DCM:MeOH=20:1, PMA) indicated Compound 3A is consumed completely and two new spots (R_{f}=0.35) formed. The reaction mixture is added to cold water (30.0 L) and stirred at 0° C. for 0.5-hour, white solid formed, filtered and dried to give Compound 4A (1.55 kg, 3.98 mol, 85.8% yield) as a white solid and used in the next step without further purification. 1H NMR: δ 7.90 (d, J=9.29 Hz, 1H), 5.64 (d, J=8.78 Hz, 1H), 5.26 (d, J=3.01 Hz, 1H), 5.06 (dd, J=11.29, 3.26 Hz, 1H), 4.22 (t, J=6.15 Hz, 1H), 3.95-4.16 (m, 3H), 2.12 (s, 3H), 2.03 (s, 3H), 1.99 (s, 3H), 1.90 (s, 3H), 1.78 (s, 3H).

### General Procedure for Preparation of Compound 5A

[chemical structure]

[0542] To a solution of Compound 4A (300 g, 771 mmol) in DCE (1.50 L) is added TMSOTf (257 g, 1.16 mol, 209 mL) and stirred for 2 hrs at 60° C., and then stirred for 1 hour at 25° C. Compound 2A (203 g, 848 mmol) is dissolved in DCE (1.50 L) and added 4 Å powder molecular sieves (150 g) stirring for 30 mins under N₂ atmosphere. Then the solution of Compound 4A in DCE is added dropwise to the mixture at 0° C. The mixture is stirred at 25° C. for 16 hrs under N₂ atmosphere. TLC (DCM:MeOH=25:1, PMA) indicated Compound 4A is consumed completely and new spot (R_{f}=0.24) formed. The reaction mixture is filtered and washed with sat. NaHCO₃ (2.00 L), water (2.00 L) and sat. brine (2.00 L). The organic layer is dried over anhydrous Na₂SO₄, filtered and concentrated under reduced pressure to give a residue. The residue is triturated with 2-Me-THE/heptane (5/3, v/v, 1.80 L) for 2 hrs, filtered and dried to give Compound 5A (225 g, 389 mmol, 50.3% yield, 98.4% purity) as a white solid. ¹H NMR: δ 7.81 (d, J=9.29 Hz, 1H), 7.20-7.42 (m, 6H), 5.21 (d, J=3.26 Hz, 1H), 4.92-5.05 (m, 3H), 4.55 (d, J=8.28 Hz, 1H), 3.98-4.07 (m, 3H), 3.82-3.93 (m, 1H), 3.71-3.81 (m, 1H), 3.55-3.62 (m, 1H), 3.43-3.53 (m, 2H), 3.37-3.43 (m, 2H), 3.14 (q, J=5.77 Hz, 2H), 2.10 (s, 3H), 1.99 (s, 3H), 1.89 (s, 3H), 1.77 (s, 3H).

### General Procedure for Preparation of NAcegal-Linker-Tosylate Salt

[chemical structure]

[0543] To a solution of Compound 5A (200 g, 352 mmol) in THF (1.0 L) is added dry Pd/C (15.0 g, 10% purity) and TsOH (60.6 g, 352 mmol) under N₂ atmosphere. The suspension is degassed under vacuum and purged with H₂ several times. The mixture is stirred at 25° C. for 3 hrs under H₂ (45 psi) atmosphere. TLC (DCM:MeOH=10:1, PMA) indicated Compound 5A is consumed completely and one new spot (R_{f}=0.04) is formed. The reaction mixture is filtered and concentrated (≤40° C.) under reduced pressure to give a residue. Diluted with anhydrous DCM (500 mL, dried overnight with 4 Å molecular sieves (dried at 300° C. for 12 hrs)) and concentrate to give a residue and run Karl Fisher (KF) to check for water content. This is repeated 3 times with anhydrous DCM (500 mL) dilutions and concentration to give NAcegal-Linker-TMSOTf (205 g, 95.8% yield, TsOH salt) as a foamy white solid. ¹H NMR: δ 7.91 (d, J=9.03 Hz, 1H), 7.53-7.86 (m, 2H), 7.49 (d, J=8.03 Hz, 2H), 7.13 (d, J=8.03 Hz, 2H), 5.22 (d, J=3.26 Hz, 1H), 4.98 (dd, J=11.29, 3.26 Hz, 1H), 4.57 (d, J=8.53 Hz, 1H), 3.99-4.05 (m, 3H), 3.87-3.94 (m, 1H), 3.79-3.85 (m, 1H), 3.51-3.62 (m, 5H), 2.96 (br t, J=5.14 Hz, 2H), 2.29 (s, 3H), 2.10 (s, 3H), 2.00 (s, 3H), 1.89 (s, 3H), 1.78 (s, 3H).

### Scheme for the Preparation of TRIS-PEG2-CBZ

[chemical structure]

[chemical structure]

### General Procedure for Preparation of Compound 5B

[chemical structure]

[0544] To a solution of Compound 4B (400 g, 1.67 mol, 1.00 eq) and NaOH (10 M, 16.7 mL, 0.10 eq) in THF (2.00 L) is added Compound 4B_2 (1.07 kg, 8.36 mol, 1.20 L, 5.00 eq), the mixture is stirred at 30° C. for 2 hrs. LCMS showed the desired MS is given. Five batches of solution are combined to one batch, then the mixture is diluted with water (6.00 L), extracted with ethyl acetate (3.00 L*3), the combined organic layer is washed with brine (3.00 L), dried over Na₂SO₄, filtered and concentrated under vacuum. The crude is purified by column chromatography (SiO₂, petroleum ether:ethyl acetate=100:1-10:1, R (=0.5) to give Compound 5B (2.36 kg, 6.43 mol, 76.9% yield) as light-yellow oil. HNMR: δ 7.31-7.36 (m, 5H), 5.38 (s, 1H), 5.11-5.16 (m, 2H), 3.75 (t, J=6.4 Hz), 3.54-3.62 (m, 6H), 3.39 (d, J=5.2 Hz), 2.61 (t, J=6.0 Hz).

### General Procedure for Preparation of 3-oxo-1-phenyl-2,7,10-trioxa-4-azatridecan-13-oic acid (Compound 2B Below)

[chemical structure]

[0545] To a solution of Compound 5B (741 g, 2.02 mol, 1.00 eq) in DCM (2.80 L) is added TFA (1.43 kg, 12.5 mol, 928 mL, 6.22 eq), the mixture is stirred at 25° C. for 3 hrs. LCMS showed the desired MS is given. The mixture is diluted with DCM (5.00 L), washed with water (3.00 L*3), brine (2.00 L), the combined organic layer is dried over Na₂SO₄, filtered and concentrated under vacuum to give Compound 2B (1800 g, crude) as light-yellow oil. ¹H NMR: δ 9.46 (s, 5H), 7.27-7.34 (m, 5H), 6.50-6.65 (m, 1H), 5.71 (s, 1H), 5.10-5.15 (m, 2H), 3.68-3.70 (m, 14H), 3.58-3.61 (m, 6H), 3.39 (s, 2H), 2.55 (s, 6H), 2.44 (s, 2H).

### General Procedure for Preparation of Compound 3B

[chemical structure]

[0546] To a solution of Compound 2B (375 g, 999 mmol, 83.0% purity, 1.00 eq) in DCM (1.80 L) is added HATU (570 g, 1.50 mol, 1.50 eq) and DIEA (258 g, 2.00 mol, 348 mL, 2.00 eq) at 0° C., the mixture is stirred at 0° C. for 30 min, then Compound 1B (606 g, 1.20 mol, 1.20 eq) is added, the mixture is stirred at 25° C. for 1 hr. LCMS showed desired MS is given. The mixture is combined to one batch, then the mixture is diluted with DCM (5.00 L), washed with 1 N HCl aqueous solution (2.00 L*2), then the organic layer is washed with saturated Na₂CO₃ aqueous solution (2.00 L*2) and brine (2.00 L), the organic layer is dried over Na₂SO₄, filtered and concentrated under vacuum to give Compound 3B (3.88 kg, crude) as yellow oil.

### General Procedure for Preparation of TRIS-PEG2-CBZ

[chemical structure]

[0547] A solution of Compound 3B (775 g, 487 mmol, 50.3% purity, 1.00 eq) in HCl/dioxane (4 M, 2.91 L, 23.8 eq) is stirred at 25° C. for 2 hrs. LCMS showed the desired MS is given. The mixture is concentrated under vacuum to give a residue. Then the combined residue is diluted with DCM (5.00 L), adjusted to pH=8 with 2.5 M NaOH aqueous solution, and separated. The aqueous phase is extracted with DCM (3.00 L) again, then the aqueous solution is adjusted to pH=3 with 1 N HCl aqueous solution, then extracted with DCM (5.00 L*2), the combined organic layer is washed with brine (3.00 L), dried over Na₂SO₄, filtered and concentrated under vacuum. The crude is purified by column chromatography (SiO₂, DCM:MeOH=0:1-12:1, 0.1% HOAc, R_{f}=0.4). The residue is diluted with DCM (5.00 L), adjusted to pH=8 with 2.5 M NaOH aqueous solution, separated, the aqueous solution is extracted with DCM (3.00 L) again, then the aqueous solution is adjusted to pH=3 with 6 N HCl aqueous solution, extracted with DCM:MeOH=10:1 (5.00 L*2), the combined organic layer is washed with brine (2.00 L), dried over Na₂SO₄, filtered and concentrated under vacuum to give a residue. Then the residue is diluted with MeCN (5.00 L), concentrated under vacuum, repeat this procedure twice to remove water to give TRIS-PEG2-CBZ (1.25 kg, 1.91 mol, 78.1% yield, 95.8% purity) as light-yellow oil. 1HNMR: 400 MHZ, MeOD, δ 7.30-7.35 (5H), 5.07 (s, 2H), 3.65-3.70 (m, 16H), 3.59 (s, 4H), 3.45 (t, J=5.6 Hz), 2.51 (t, J=6.0 Hz), 2.43 (t, 6.4 Hz).

[0548] Scheme for the preparation of TriNGal-TRIS-Peg2-Phosph 8c

[chemical structure]

[chemical structure]

[chemical structure]

[chemical structure]

### TriGNal-TRIS-Peg2-Phosph 8c

### General Procedure for Preparation of Compound 3C

[chemical structure]

[0549] To a solution of Compound 1C (155 g, 245 mmol, 1.00 eq) in ACN (1500 mL) is added TBTU (260 g, 811 mmol, 3.30 eq), DIEA (209 g, 1.62 mol, 282 mL, 6.60 eq) and Compound 2C (492 g, 811 mmol, 3.30 eq, TsOH) at 0° C., the mixture is stirred at 15° C. for 16 hrs. LCMS showed the desired MS is given. The mixture is concentrated under vacuum to give a residue, then the mixture is diluted with DCM (2000 mL), washed with 1 N HCl aqueous solution (700 mL*2), then saturated NaHCO₃ aqueous solution (700 mL*2) and concentrated under vacuum. The crude is purified by column chromatography to give Compound 3C (304 g, 155 mmol, 63.1% yield, 96.0% purity) as a yellow solid.

### General Procedure for Preparation of Compound 4C

[chemical structure]

[0550] Two batches solution of Compound 3C (55.0 g, 29.2 mmol, 1.00 eq) in MeOH (1600 mL) is added Pd/C (6.60 g, 19.1 mmol, 10.0% purity) and TFA (3.34 g, 29.2 mmol, 2.17 mL, 1.00 eq), the mixture is degassed under vacuum and purged with H₂. The mixture is stirred under H₂ (15 psi) at 15° C. for 2 hours. LCMS showed the desired MS is given. The mixture is filtered and the filtrate is concentrated under vacuum to give Compound 4C (106 g, 54.8 mmol, 93.7% yield, 96.2% purity, TFA) as a white solid.

### General Procedure for Preparation of Compound 5C

[chemical structure]

[0551] Two batches in parallel. To a solution of EDCI (28.8 g, 150 mmol, 1.00 eq) in DCM (125 mL) is added compound 4a (25.0 g, 150 mmol, 1.00 eq) dropwise at 0° C., then the mixture is added to compound 4 (25.0 g, 150 mmol, 1.00 eq) in DCM (125 mL) at 0° C., then the mixture is stirred at 25° C. for 1 hr. TLC (Petroleum ether:Ethyl acetate=3:1, R_{f}=0.45) showed the reactant is consumed and one new spot is formed. The reaction mixture is diluted with DCM (100 mL) then washed with aq. NaHCO₃ (250 mL*1) and brine (250 mL), dried over Na₂SO₄, filtered and concentrated under reduced pressure to give a residue. The residue is purified by column chromatography (SiO₂, Petroleum ether:Ethyl acetate=100:1 to 3:1), TLC (SiO₂, Petroleum ether:Ethyl acetate=3:1), R_{f}=0.45, then concentrated under reduced pressure to give a residue. Compound 5C (57.0 g, 176 mmol, 58.4% yield, 96.9% purity) is obtained as colorless oil and confirmed 1HNMR: EW33072-2-PIA, 400 MHZ, DMSO & 9.21 (s, 1H), 7.07-7.09 (m, 2H), 6.67-6.70 (m, 2H), 3.02-3.04 (m, 2H), 2.86-2.90 (m, 2H).

### General Procedure for Preparation of Compound 6

[chemical structure]

[0552] To a mixture of compound 3 (79.0 g, 41.0 mmol, 96.4% purity, 1.00 eq, TFA) and compound 6C (14.2 g, 43.8 mmol, 96.9% purity, 1.07 eq) in DCM (800 mL) is added TEA (16.6 g, 164 mmol, 22.8 mL, 4.00 eq) dropwise at 0° C., and the mixture is stirred at 15° C. for 16 hrs. LCMS (EW33072-12-P1B, Rt=0.844 min) showed the desired mass is detected. The reaction mixture is diluted with DCM (400 mL) and washed with aq. NaHCO₃ (400 mL*1) and brine (400 mL*1), then the mixture is diluted with DCM (2.00 L) and washed with 0.7 M Na₂CO₃ (1000 mL*3) and brine (800 mL*3), dried over Na₂SO₄, filtered and concentrated under reduced pressure to give a residue. The residue is used to next step directly without purification. Compound 6 (80.0 g, crude) is obtained as white solid and confirmed via 1HNMR: EW33072-12-PIA, 400 MHz, MeOD δ 7.02-7.04 (m, 2H), 6.68-6.70 (m, 2H), 5.34-5.35 (s, 3H), 5.07-5.08 (d, J=4.00 Hz, 3H), 4.62-4.64 (d, J=8.00 Hz, 3H), 3.71-4.16 (m, 16H), 3.31-3.70 (m, 44H), 2.80-2.83 (m, 2H), 2.68 (m, 2H), 2.46-2.47 (m, 10H), 2.14 (s, 9H), 2.03 (s, 9H), 1.94-1.95 (d, J=4.00 Hz, 18H).

### General Procedure for Preparation of TriGNal-TRIS-Peg2-Phosph 8c

[chemical structure]

[0553] Two batches are synthesized in parallel. To a solution of compound 6C (40.0 g, 21.1 mmol, 1.00 eq in DCM (600 mL) is added diisopropylammonium tetrazolide (3.62 g, 21.1 mmol, 1.00 eq) and compound 7c (6.37 g, 21.1 mmol, 6.71 mL, 1.00 eq) in DCM (8.00 mL) drop-wise, the mixture is stirred at 30° C. for 1 hour, then added compound 7c (3.18 g, 10.6 mmol, 3.35 mL, 0.50 eq) in DCM (8.00 mL) drop-wise, the mixture is stirred at 30° C. for 30 mins, then added compound 7c (3.18 g, 10.6 mmol, 3.35 mL, 0.50 eq) in DCM (8.00 mL) drop-wise, the mixture is stirred at 30° C. for 1.5 hrs. LCMS (EW33072-17-P1C1, Rt=0.921 min) showed the desired MS+1 is detected. LCMS (EW33072-17-P1C2, Rt=0.919 min) showed the desired MS+1 is detected. Two batches are combined for work-up. The mixture is diluted with DCM (1.20 L), washed with saturated NaHCO₃ aqueous solution (1.60 L*2), 3% DMF in H₂O (1.60 L*2), H₂O (1.60 L*3), brine (1.60 L), dried over Na₂SO₄, filtered and concentrated under reduced pressure to give a residue. The residue is purified by column chromatography (SiO₂, DCM:MeOH:TEA=100:3:2) TLC (SiO₂, DCM:MeOH=10:1, R_{f}=0.45), then concentrated under reduced pressure to give a residue. Compound 8C (76.0 g, 34.8 mmol, 82.5% yield, 96.0% purity) is obtained as white solid and confirmed via 1HNMR: EW33072-19-PIC, 400 MHZ, MeOD δ 7.13-7.15 (d, J=8.50 Hz, 2H), 6.95-6.97 (dd, J=8.38, 1.13 Hz, 2H), 5.34 (d, J=2.88 Hz, 3H), 0.09 (dd, J=11.26, 3.38 Hz, 3H), 4.64 (d, J=8.50 Hz, 3H), 3.99-4.20 (m, 12H), 3.88-3.98 (m, 5H), 3.66-3.83 (m, 20H), 3.51-3.65 (m, 17H), 3.33-3.50 (m, 9H), 2.87 (t, J=7.63 Hz, 2H), 2.76 (t, J=5.94 Hz, 2H), 2.42-2.50 (m, 10H), 2.14 (s, 9H), 2.03 (s, 9H), 1.94-1.95 (d, J=6.13 Hz, 18H), 1.24-1.26 (d, J=6.75 Hz, 6H), 1.18-1.20 (d, J=6.75 Hz, 6H)

### Example 16: Modification Motif 1

[0554] An example MTRES1 siRNA includes a combination of the following modifications:
[0555] Position 9 (from 5′ to 3′) of the sense strand is 2′-F.
[0556] If position 9 is a pyrimidine, then all purines in the Sense Strand are 2′OMe, and 1-5 pyrimidines between positions 5 and 11 are 2′-F provided that there are never three 2′F modifications in a row.
[0557] If position 9 is a purine, then all pyrimidines in the Sense Strand are 2′OMe, and 1-5 purines between positions 5 and 11 are 2′-F provided that there are never three 2′F modifications in a row.
[0558] Antisense strand odd-numbered positions are 2′OMe and even-numbered positions are a mixture of 2′-F, 2′-OMe and 2′-deoxy.

### Example 17: Modification Motif 2

[0559] An example MTRES1 siRNA includes a combination of the following modifications:
[0560] Position 9 (from 5′ to 3′) of the sense strand is 2′-deoxy.
[0561] Sense strand positions 5, 7 and 8 are 2′-F.
[0562] All pyrimidines in positions 10-21 are 2′-OMe, and purines are a mixture of 2′-OMe and 2′-F. Alternatively, all purines in positions 10-21 are 2′-OMe and all pyrimidines in positions 10-21 are a mixture of 2′-OMe and 2′-F.
[0563] Antisense strand odd-numbered positions are 2′OMe and even-numbered positions are a mixture of 2′-F, 2′OMe and 2′-deoxy.

### Example 18: Protective Variants in MTRES1 Modulate APOE E4-Mediated Risk of Alzheimer's Disease and Dementia

[0564] The major common genetic risk factor for Alzheimer's disease is the APOE haplotype, with permutations of 2 genetic variants, rs429358 (p.Cys112Arg) and rs7412 (p.Arg158Cys) defining 3 major APOE haplotypes-E2, E3 and E4 (Table 20). The APOE2 haplotype is considered protective, APOE3 haplotype is considered ‘neutral’ and APOE4 haplotype is considered risk for Alzheimer's disease and dementia.

TABLE 20
APOE alleles and haplotypes

| APOE | | | |
|---|---|---|---|
| Allele | ε2 | ε3 | ε4 |
| Haplotype | rs429358-T | rs429358-T | rs429358-C |
| | (p.112Cys) | (p.112Cys) | (p.112Arg) |
| | rs7412-T | rs7412-C | rs7412-C |
| | (p.158Cys) | (p.158Arg) | (p.158Arg) |

[0565] Stratified genetic analyses were performed to evaluate the effect of the MTRES1 rs117058816 splice donor variant (c.3+1G>A) on an APOE4 risk background in 452,401 individuals with genotype data from the UK Biobank cohort. All stratified analyses were performed under the assumption that the APOE3 haplotype and the MTRES1 rs117058816 (c.3+1G>A) reference (G) alleles are ‘neutral’, therefore the reference group in these analyses consists of individuals who are MTRES1 rs117058816 (c.3+1G>A) G/G and APOE E3/E3.

[0566] In addition to replicating the well-known association between APOE4 and significantly increased risk of dementia, the analyses indicate that APOE4 homozygous individuals that carry a single copy of MTRES1 rs117058816-A (c.3+1A) alternative (A) allele have approximately half the relative risk of dementia compared with APOE4 homozygous individuals that are homozygous for the MTRES1 rs117058816-G (c.3+1G) reference (G) allele (Table 21).

TABLE 21
APOE4 and MTRES1 rs117058816 (c.3 + 1G > A) stratified analyses

| | | | Dementia (n = 4,009) | | |
|---|---|---|---|---|---|
| Variant | Gene | EAF | P value | OR | APOE4/E4 Relative Risk |
| E4/E4 vs. E3/E3 | APOE | 0.02 | <5E−324 | ↑10.688 | 1.00 |
| G/G E4/E4 vs. G/G E3/E3 | MTRES1/APOE | 0.02 | <5E−324 | ↑10.652 | 0.997 |
| G/A E4/E4 vs. G/G E3/E3 | MTRES1/APOE | 0.003 | 0.003 | ↑5.412 | ↓0.506 |

[0567] These results indicate that loss-of-function of MTRES1 results in protection from dementia even in the context of the exceptionally high genetic risk conferred by APOE4 homozygosity. These results further indicate that therapeutic inhibition of MTRES1 may result in similar disease-protective effects in APOE4 heterozygous and homozygous carriers at increased genetic risk of Alzheimer's disease and dementia.

### Example 19: Protective Variants in MTRES1 Modulate Polygenic Risk of Alzheimer's Disease and Dementia

[0568] Polygenic risk scores (PRS) are increasingly being utilized in the screening, diagnosis and treatment of disease. PRS aggregate the effects (or weights) of a large number of genetic variants on a given disease to estimate an individual's risk for that disease. Those individuals within the highest percentiles of the score tend to have a higher incidence of the disease as compared to individuals in the percentiles below, and this information can be utilized in both clinical and research settings to select individuals most likely to benefit from a diagnostic test or therapeutic intervention.

[0569] A PRS score was generated using publicly available weights from 37 independent genetic variants, with a p value less than 1e-5 within a meta-analysis of Alzheimer's disease (PGS catalogue-PGS000898). Notably, this set of variants did not include the APOE locus, allowing examination of APOE-independent polygenic risk for Alzheimer's. The PRS score was calculated for 452,401 individuals with genotype data from the UK Biobank cohort, multiplying weights by the number of alternative alleles, and summing across all variants per individual. Examining model performance, individuals in the upper 20th percentile of PRS scores were 1.68 times more likely to have all cause dementia as compared to those in the remaining 80% of samples.

[0570] Genetic analyses were performed to evaluate the effect of the MTRES1 rs117058816 splice donor variant (c.3+1G>A) on the risk of dementia in the full sample of 452,401 UK Biobank participants and in subsetted strata comprising the upper 20th and 40th percentiles of the Alzheimer's disease PRS (90,492 participants and 158,331 participants respectively).

[0571] The analyses indicate that the MTRES1 rs117058816 splice donor variant (c.3+1G>A) is associated with protection from dementia in all individuals and in individuals at high polygenic risk of Alzheimer's disease, with a notable increase in the already large protective effect size as the polygenic risk increases (allelic odds ratios of 0.489, 0.337, and 0.291 among all individuals and individuals in the top 40th and 20th percentiles for PRS risk respectively) (Table 22).

TABLE 22
MTRES1 rs117058816 (c.3 + 1G > A) associations within Alzheimer's Disease PRS strata

| | | | | Dementia (n = 4,009) | |
|---|---|---|---|---|---|
| Variant | Gene | PRS Strata | N in Strata | P value | OR |
| rs117058816 (c.3 + 1G > A) | MTRES1 | None (all individuals) | 452,401 | 7.92E−07 | ↓0.489 |
| rs117058816 (c.3 + 1G > A) | MTRES1 | Upper 40^{th} Percentile | 158,331 | 7.07E−07 | ↓0.337 |
| rs117058816 (c.3 + 1G > A) | MTRES1 | Upper 20^{th} Percentile | 90,492 | 3.14E−05 | ↓0.291 |

[0572] These results indicate that in the context of APOE-independent, high polygenic risk for Alzheimer's disease, MTRES1 loss-of-function confers protection from dementia. These results further indicate that therapeutic inhibition of MTRES1 may result in similar disease-protective effects in individuals with high polygenic risk for Alzheimer's disease and dementia.

### Example 20. Screening siRNAs Targeting at Least Human and Mouse MTRES1 in Mice

[0573] Several GalNAc-conjugated siRNAs designed to be cross-reactive with at least human and mouse MTRES1 mRNA were tested for activity in mice. The siRNAs contained either GalNAc ligand ETL1 or ETL17. The siRNA sequences are shown in Table 23, where Nf is a 2′-fluoro-modified nucleoside, n is a 2′-O-methyl modified nucleoside, “d” is a deoxynucleoside, and “s” is a phosphorothioate linkage. Base sequences are shown in Tables 24-25.

[0574] Six- to eight-week-old female mice (strain ICR, n=3) were given a subcutaneous injection on Day 0 of a single 100 μg dose of a GalNAc-conjugated siRNA or PBS as vehicle control. ETD01944 targeting mouse MTRES1 mRNA was included as a positive control.

[0575] Mice were euthanized on Day 10 after injection and a liver sample from each was collected and placed in RNAlater (ThermoFisher Catalog #AM7020) until processing. Total liver RNA was prepared by homogenizing the liver tissue in homogenization buffer (Maxwell RSC simplyRNA Tissue Kit) using a Percellys 24 tissue homogenizer (Bertin Instruments) set at 5000 rpm for two 10 second cycles. Total RNA from the lysate was purified on a Maxwell RSC 48 platform (Promega Corporation) according to the manufacturer's recommendations. Preparation of cDNA was performed using Quanta qScript cDNA SuperMix (VWR, Catalog #95048-500) according to the manufacturer's instructions. The relative levels of liver MTRES1 mRNA were assessed by RT-qPCR in triplicate on a QuantStudio™ 6 Pro Real-Time PCR System using TaqMan assays for mouse MTRES1 (ThermoFisher, assay #Mm01229834_m1) and the mouse housekeeping gene PPIA (ThermoFisher, assay #Mm02342430_g1) and PerfeCTaR qPCR FastMix®, Low ROX™ (VWR, Catalog #101419-222). Data were normalized to the mean MTRES1 mRNA level in animals receiving PBS. Results are shown in Table 26. Mice receiving ETD01597, ETD02075 and ETD02077 had the highest level of mean MTRES1 mRNA knockdown in the liver.

TABLE 23
Example siRNA Sequences

| | | | Anti- | |
|---|---|---|---|---|
| | Sense | | sense | |
| | Strand | | Strand | |
| siRNA | SEQ ID | Sense Strand Sequence | SEQ ID | Antisense Strand Sequence |
| Name | NO: | (5′-3′) with GalNAc moiety | NO: | (5′-3′) |
| ETD01507 | 3038 | [ETL1]csus AfcAfaAfgGfuGfa | 3125 | usCfsugaGfuUfcaccuUfuGfua |
| | | AfcucAfgAfsusu | | gsusu |
| ETD01944 | 3039 | [ETL17]sagcaAfuAfuAfAfacuc | 3126 | usUfsuUfgGfaGfuUfuAfuAfu |
| | | caaaasusu | | UfgCfususu |
| ETD01955 | 3040 | [ETL17]scuuccuGfGfAfAfucga | 3127 | usAfsgUfaUfcGfaUfuCfcAfg |
| | | uacuasusu | | GfaAfgsusu |
| ETD02071 | 3041 | [ETL17]suuccuGfGfAfAfucga | 3128 | usAfsaGfuAfuCfgAfuUfcCfa |
| | | uacuuasusu | | GfgAfasusu |
| ETD02072 | 3042 | [ETL17]succuGfgAfAfdUCfga | 3129 | usCfsaAfgUfaUfcGfaUfuCfc |
| | | uacuugasusu | | AfgGfasusu |
| ETD02073 | 3043 | [ETL17]sccugGfaAfUfdCgaua | 3130 | usAfscAfaGfuAfuCfgAfuUfc |
| | | cuuguasusu | | CfaGfgsusu |
| ETD02074 | 3044 | [ETL17]suuguaUfUfUfUfUfcu | 3131 | usGfsgUfaCfuAfgAfaAfaAfu |
| | | aguaccasusu | | AfcAfasusu |
| ETD02075 | 3045 | [ETL17]sucuacAfAfAfGfGfug | 3132 | usUfsgAfgUfuCfaCfcUfuUfg |
| | | aacucaasusu | | UfaGfasusu |
| ETD02076 | 3046 | [ETL17]scaaaGfGfuGfAfacuca | 3133 | usAfsgCfcUfgAfgUfuCfaCfc |
| | | ggcuasusu | | UfuUfgsusu |
| ETD02077 | 3047 | [ETL17]sgaagAfAfAfAfGfcag | 3134 | usAfscCfgUfuCfuGfcUfuUfu |
| | | aacgguasusu | | CfuUfcsusu |
| ETD02078 | 3048 | [ETL17]saagaAfaAfGfdCagaac | 3135 | usCfsaCfcGfuUfcUfgCfuUfu |
| | | ggugasusu | | UfcUfususu |
| ETD02079 | 3049 | [ETL17]sgaaaAfGfcAfGfaAfcg | 3136 | usUfsuCfaCfcGfuUfcUfgCfu |
| | | gugaaasusu | | UfuUfcsusu |
| ETD02080 | 3050 | [ETL17]scagaAfcGfGfdUgaaa | 3137 | usCfscCfaCfuUfuCfaCfcGfuU |
| | | gugggasusu | | fcUfgsusu |

TABLE 24
Example siRNA Base Sequences

| | SEQ | | SEQ | |
|---|---|---|---|---|
| siRNA | ID | Sense Strand Base | ID | Antisense Strand Base |
| Name | NO: | Sequence (5′ to 3′) | NO: | Sequence (5′ to 3′) |
| ETD01507 | 2674 | CUACAAAGGUGAACUCAGAUU | 2856 | UCUGAGUUCACCUUUGUAGUU |
| ETD01944 | 2675 | AGCAAUAUAAACUCCAAAAUU | 2857 | UUUUGGAGUUUAUAUUGCUUU |
| ETD01955 | 2676 | CUUCCUGGAAUCGAUACUAUU | 2858 | UAGUAUCGAUUCCAGGAAGUU |
| ETD02071 | 2677 | UUCCUGGAAUCGAUACUUAUU | 2859 | UAAGUAUCGAUUCCAGGAAUU |
| ETD02072 | 2678 | UCCUGGAAUCGAUACUUGAUU | 2860 | UCAAGUAUCGAUUCCAGGAUU |
| ETD02073 | 2679 | CCUGGAAUCGAUACUUGUAUU | 2861 | UACAAGUAUCGAUUCCAGGUU |
| ETD02074 | 2680 | UUGUAUUUUUCUAGUACCAUU | 2862 | UGGUACUAGAAAAAUACAAUU |
| ETD02075 | 2681 | UCUACAAAGGUGAACUCAAUU | 2863 | UUGAGUUCACCUUUGUAGAUU |
| ETD02076 | 2682 | CAAAGGUGAACUCAGGCUAUU | 2864 | UAGCCUGAGUUCACCUUUGUU |
| ETD02077 | 2683 | GAAGAAAAGCAGAACGGUAUU | 2865 | UACCGUUCUGCUUUUCUUCUU |
| ETD02078 | 2684 | AAGAAAAGCAGAACGGUGAUU | 2866 | UCACCGUUCUGCUUUUCUUUU |
| ETD02079 | 2685 | GAAAAGCAGAACGGUGAAAUU | 2867 | UUUCACCGUUCUGCUUUUCUU |
| ETD02080 | 2686 | CAGAACGGUGAAAGUGGGAUU | 2868 | UCCCACUUUCACCGUUCUGUU |

TABLE 25
Example siRNA Base Sequences without 3′ overhangs

| | SEQ | Sense Strand Base | SEQ | Antisense Strand Base |
|---|---|---|---|---|
| siRNA | ID | Sequence (5′ to 3′), | ID | Sequence (5′ to 3′), |
| Name | NO: | without 3′ overhangs | NO: | without 3′ overhangs |
| ETD01507 | 2688 | CUACAAAGGUGAACUCAGG | 2870 | UCUGAGUUCACCUUUGUAG |
| ETD01944 | 2689 | AGCAAUAUAAACUCCAAAA | 2871 | UUUUGGAGUUUAUAUUGCU |
| ETD01955 | 2690 | CUUCCUGGAAUCGAUACUU | 2872 | UAGUAUCGAUUCCAGGAAG |
| ETD02071 | 2691 | UUCCUGGAAUCGAUACUUG | 2873 | UAAGUAUCGAUUCCAGGAA |
| ETD02072 | 2692 | UCCUGGAAUCGAUACUUGU | 2874 | UCAAGUAUCGAUUCCAGGA |
| ETD02073 | 2693 | CCUGGAAUCGAUACUUGUA | 2875 | UACAAGUAUCGAUUCCAGG |
| ETD02074 | 2694 | UUGUAUUUUUCUAGUACCA | 2876 | UGGUACUAGAAAAAUACAA |
| ETD02075 | 2695 | UCUACAAAGGUGAACUCAG | 2877 | UUGAGUUCACCUUUGUAGA |
| ETD02076 | 2696 | CAAAGGUGAACUCAGGCUG | 2878 | UAGCCUGAGUUCACCUUUG |
| ETD02077 | 2697 | GAAGAAAAGCAGAACGGUG | 2879 | UACCGUUCUGCUUUUCUUC |
| ETD02078 | 2698 | AAGAAAAGCAGAACGGUGA | 2880 | UCACCGUUCUGCUUUUCUU |
| ETD02079 | 2699 | GAAAAGCAGAACGGUGAAA | 2881 | UUUCACCGUUCUGCUUUUC |
| ETD02080 | 2700 | CAGAACGGUGAAAGUGGGA | 2882 | UCCCACUUUCACCGUUCUG |

TABLE 26
Relative MTRES1 mRNA Levels in Livers of Mice

| | | | Dose | Mean MTRES1 mRNA (Normalized |
|---|---|---|---|---|
| Group | n | Treatment | (ug) | to Group 1, Day 10) |
| 1 | 3 | PBS | | 1.00 |
| 2 | 3 | ETD01507 | 100 | 0.03 |
| 3 | 3 | ETD01944 | 100 | 0.27 |
| 4 | 3 | ETD01955 | 100 | 0.27 |
| 5 | 3 | ETD02071 | 100 | 0.92 |
| 6 | 3 | ETD02072 | 100 | 0.77 |
| 7 | 3 | ETD02073 | 100 | 0.76 |
| 8 | 3 | ETD02074 | 100 | 0.73 |
| 9 | 3 | ETD02075 | 100 | 0.18 |
| 10 | 3 | ETD02076 | 100 | 0.60 |
| 11 | 3 | ETD02077 | 100 | 0.18 |

### Example 21. Screening MTRES1 siRNAs with Alternative Modification Patterns in Mice

[0576] The base sequences of ETD02075 and ETD2077 were synthesized with alternative modification patterns and then tested for activity in mice. The siRNA sequences are shown in Table 27, where Nf is a 2′-fluoro-modified nucleoside, n is a 2′-O-methyl modified nucleoside, and “s” is a phosphorothioate linkage. All siRNAs were conjugated to the GalNAc ligand ETL17. Base sequences are shown in Table 28.

[0577] Six- to eight-week-old female mice (strain ICR, n=3) were given a subcutaneous injection on Day 0 of a single 100 μg dose of a GalNAc-conjugated siRNA or PBS as vehicle control.

[0578] Mice were euthanized on Day 14 after injection and a liver sample from each was collected and placed in RNAlater (ThermoFisher Catalog #AM7020) until processing. Total liver RNA was prepared by homogenizing the liver tissue in homogenization buffer (Maxwell RSC simplyRNA Tissue Kit) using a Percellys 24 tissue homogenizer (Bertin Instruments) set at 5000 rpm for two 10 second cycles. Total RNA from the lysate was purified on a Maxwell RSC 48 platform (Promega Corporation) according to the manufacturer's recommendations. Preparation of cDNA was performed using Quanta qScript cDNA SuperMix (VWR, Catalog #95048-500) according to the manufacturer's instructions. The relative levels of liver MTRES1 mRNA were assessed by RT-qPCR in triplicate on a QuantStudio™ 6 Pro Real-Time PCR System using TaqMan assays for mouse MTRES1 (ThermoFisher, assay #Mm01229834_m1) and the mouse housekeeping gene PPIA (ThermoFisher, assay #Mm02342430_g1) and PerfeCTa® qPCR FastMix®, Low ROX™ (VWR, Catalog #101419-222). Data were normalized to the mean MTRES1 mRNA level in animals receiving PBS. Results are shown in Table 29. Of the alternatively modified versions of ETD02075, mice receiving ETD02182, ETD02183 and ETD02185 had the highest level of mean MTRES1 mRNA knockdown in the liver. Of the alternatively modified versions of ETD02077, mice receiving ETD02189 and ETD02192 had the highest level of mean MTRES1 mRNA knockdown in the liver.

TABLE 27
Example siRNA Sequences

| | Sense | | Antisense | |
|---|---|---|---|---|
| | Strand | Sense Strand | Strand | |
| SiRNA | SEQ ID | Sequence (5′-3′) | SEQ ID | Antisense Strand Sequence |
| Name | NO: | with GalNAc moiety | NO: | (5′-3′) |
| ETD02075 | 3051 | [ETL17]sucuacAfAfAfGfGfug | 3138 | usUfsgAfgUfuCfaCfcUfuUfg |
| | | aacucaasusu | | UfaGfasusu |
| ETD02179 | 3052 | [ETL17]sucuacaAfAfGfGfugaa | 3139 | usUfsgAfgUfuCfaCfcUfuUfg |
| | | cucaasusu | | UfaGfasusu |
| ETD02180 | 3053 | [ETL17]sucuacaAfAfGfGfuGf | 3140 | usUfsgAfgUfuCfaCfcUfuUfg |
| | | aacucaasusu | | UfaGfasusu |
| ETD02181 | 3054 | [ETL17]sucuacAfAfAfGfGfug | 3141 | usUfsgagUfuCfaCfcuuUfgUfa |
| | | aacucaasusu | | Gfasusu |
| ETD02182 | 3055 | [ETL17]sucuacAfAfAfGfGfug | 3142 | usUfsgagUfuCfaCfcUfuUfgUf |
| | | aacucaasusu | | aGfasusu |
| ETD02183 | 3056 | [ETL17]sucuacAfAfAfGfGfug | 3143 | usUfsgaGfuUfcaCfcUfuUfgUf |
| | | aacucaasusu | | aGfasusu |
| ETD02184 | 3057 | [ETL17]sucuacAfAfAfGfGfug | 3144 | usUfsgaGfuUfcAfccuuUfgUfa |
| | | aacucaasusu | | Gfasusu |
| ETD02185 | 3058 | [ETL17]sucuacAfAfAfGfGfug | 3145 | usUfsgAfguUfcAfccuuUfgUfa |
| | | aacucaasusu | | Gfasusu |
| ETD02186 | 3059 | [ETL17]sucuacAfAfAfGfgugaa | 3146 | usUfsgAfgUfuCfaCfcuuUfgU |
| | | cucaasusu | | faGfasusu |
| ETD02077 | 3060 | [ETL17]sgaagAfAfAfAfGfcag | 3147 | usAfscCfgUfuCfuGfcUfuUfu |
| | | aacgguasusu | | CfuUfcsusu |
| ETD02187 | 3061 | [ETL17]sgaagaAfAfAfGfcagaa | 3148 | usAfscCfgUfuCfuGfcUfuUfu |
| | | cgguasusu | | CfuUfcsusu |
| ETD02188 | 3062 | [ETL17]sgaagaAfAfAfGfcAfg | 3149 | usAfscCfgUfuCfuGfcUfuUfu |
| | | aacgguasusu | | CfuUfcsusu |
| ETD02189 | 3063 | [ETL17]sgaagAfAfAfAfGfcag | 3150 | usAfsccgUfuCfuGfcUfuUfuCf |
| | | aacgguasusu | | uUfcsusu |
| ETD02190 | 3064 | [ETL17]sgaagAfAfAfAfGfcag | 3151 | usAfsccgUfuCfuGfcuuUfuCfu |
| | | aacgguasusu | | Ufcsusu |
| ETD02191 | 3065 | [ETL17]sgaagAfAfAfAfGfcag | 3152 | usAfsccgUfuCfugcUfuUfuCfu |
| | | aacgguasusu | | Ufcsusu |
| ETD02192 | 3066 | [ETL17]sgaagAfAfAfAfGfcag | 3153 | usAfsccGfuUfcuGfcUfuUfuCf |
| | | aacgguasusu | | uUfcsusu |
| ETD02193 | 3067 | [ETL17]sgaagAfAfAfAfGfcag | 3154 | usAfscCfguUfcuGfcUfuUfuCf |
| | | aacgguasusu | | uUfcsusu |
| ETD02194 | 3068 | [ETL17]sgaagAfAfAfAfGfcag | 3155 | usAfscCfguUfcuGfcuuUfuCfu |
| | | aacgguasusu | | Ufcsusu |

TABLE 28
Example siRNA Base Sequences

| | SEQ | Sense Strand | SEQ | Antisense Strand |
|---|---|---|---|---|
| siRNA | ID | Base Sequence | ID | Base Sequence |
| Name | NO: | (5′ to 3′) | NO: | (5′ to 3′) |
| ETD02075 | 2701 | UCUACAAAGGUGAACUCAAUU | 2883 | UUGAGUUCACCUUUGUAGAUU |
| ETD02179 | 2702 | UCUACAAAGGUGAACUCAAUU | 2884 | UUGAGUUCACCUUUGUAGAUU |
| ETD02180 | 2703 | UCUACAAAGGUGAACUCAAUU | 2885 | UUGAGUUCACCUUUGUAGAUU |
| ETD02181 | 2704 | UCUACAAAGGUGAACUCAAUU | 2886 | UUGAGUUCACCUUUGUAGAUU |
| ETD02182 | 2705 | UCUACAAAGGUGAACUCAAUU | 2887 | UUGAGUUCACCUUUGUAGAUU |
| ETD02183 | 2706 | UCUACAAAGGUGAACUCAAUU | 2888 | UUGAGUUCACCUUUGUAGAUU |
| ETD02184 | 2707 | UCUACAAAGGUGAACUCAAUU | 2889 | UUGAGUUCACCUUUGUAGAUU |
| ETD02185 | 2708 | UCUACAAAGGUGAACUCAAUU | 2890 | UUGAGUUCACCUUUGUAGAUU |
| ETD02186 | 2709 | UCUACAAAGGUGAACUCAAUU | 2891 | UUGAGUUCACCUUUGUAGAUU |
| ETD02077 | 2710 | GAAGAAAAGCAGAACGGUAUU | 2892 | UACCGUUCUGCUUUUCUUCUU |
| ETD02187 | 2711 | GAAGAAAAGCAGAACGGUAUU | 2893 | UACCGUUCUGCUUUUCUUCUU |
| ETD02188 | 2712 | GAAGAAAAGCAGAACGGUAUU | 2894 | UACCGUUCUGCUUUUCUUCUU |
| ETD02189 | 2713 | GAAGAAAAGCAGAACGGUAUU | 2895 | UACCGUUCUGCUUUUCUUCUU |
| ETD02190 | 2714 | GAAGAAAAGCAGAACGGUAUU | 2896 | UACCGUUCUGCUUUUCUUCUU |
| ETD02191 | 2715 | GAAGAAAAGCAGAACGGUAUU | 2897 | UACCGUUCUGCUUUUCUUCUU |
| ETD02192 | 2716 | GAAGAAAAGCAGAACGGUAUU | 2898 | UACCGUUCUGCUUUUCUUCUU |
| ETD02193 | 2717 | GAAGAAAAGCAGAACGGUAUU | 2899 | UACCGUUCUGCUUUUCUUCUU |
| ETD02194 | 2718 | GAAGAAAAGCAGAACGGUAUU | 2900 | UACCGUUCUGCUUUUCUUCUU |
| | | | | Antisense Strand |
| | SEQ | Sense Strand Base | SEQ | Base Sequence |
| siRNA | ID | Sequence (5′ to 3′), | ID | (5′ to 3′), without |
| Name | NO: | without 3′ overhangs | NO: | 3′ overhangs |
| ETD02075 | 2720 | UCUACAAAGGUGAACUCAA | 2902 | UUGAGUUCACCUUUGUAGA |
| ETD02179 | 2721 | UCUACAAAGGUGAACUCAA | 2903 | UUGAGUUCACCUUUGUAGA |
| ETD02180 | 2722 | UCUACAAAGGUGAACUCAA | 2904 | UUGAGUUCACCUUUGUAGA |
| ETD02181 | 2723 | UCUACAAAGGUGAACUCAA | 2905 | UUGAGUUCACCUUUGUAGA |
| ETD02182 | 2724 | UCUACAAAGGUGAACUCAA | 2906 | UUGAGUUCACCUUUGUAGA |
| ETD02183 | 2725 | UCUACAAAGGUGAACUCAA | 2907 | UUGAGUUCACCUUUGUAGA |
| ETD02184 | 2726 | UCUACAAAGGUGAACUCAA | 2908 | UUGAGUUCACCUUUGUAGA |
| ETD02185 | 2727 | UCUACAAAGGUGAACUCAA | 2909 | UUGAGUUCACCUUUGUAGA |
| ETD02186 | 2728 | UCUACAAAGGUGAACUCAA | 2910 | UUGAGUUCACCUUUGUAGA |
| ETD02077 | 2729 | GAAGAAAAGCAGAACGGUA | 2911 | UACCGUUCUGCUUUUCUUC |
| ETD02187 | 2730 | GAAGAAAAGCAGAACGGUA | 2912 | UACCGUUCUGCUUUUCUUC |
| ETD02188 | 2731 | GAAGAAAAGCAGAACGGUA | 2913 | UACCGUUCUGCUUUUCUUC |
| ETD02189 | 2732 | GAAGAAAAGCAGAACGGUA | 2914 | UACCGUUCUGCUUUUCUUC |
| ETD02190 | 2733 | GAAGAAAAGCAGAACGGUA | 2915 | UACCGUUCUGCUUUUCUUC |
| ETD02191 | 2734 | GAAGAAAAGCAGAACGGUA | 2916 | UACCGUUCUGCUUUUCUUC |
| ETD02192 | 2735 | GAAGAAAAGCAGAACGGUA | 2917 | UACCGUUCUGCUUUUCUUC |
| ETD02193 | 2736 | GAAGAAAAGCAGAACGGUA | 2918 | UACCGUUCUGCUUUUCUUC |
| ETD02194 | 2737 | GAAGAAAAGCAGAACGGUA | 2919 | UACCGUUCUGCUUUUCUUC |

TABLE 29
Relative MTRES1 mRNA Levels in Livers of Mice

| | | | Dose | Mean MTRES1 mRNA (Normalized |
|---|---|---|---|---|
| Group | n | Treatment | (ug) | to Group 1, Day 14) |
| 1 | 3 | PBS | | 1.00 |
| 2 | 3 | ETD02075 | 100 | 0.11 |
| 3 | 3 | ETD02179 | 100 | 0.20 |
| 4 | 3 | ETD02180 | 100 | 0.22 |
| 5 | 3 | ETD02181 | 100 | 0.14 |
| 6 | 3 | ETD02182 | 100 | 0.10 |
| 7 | 3 | ETD02183 | 100 | 0.10 |
| 8 | 3 | ETD02184 | 100 | 0.20 |
| 9 | 3 | ETD02185 | 100 | 0.12 |
| 10 | 3 | ETD02186 | 100 | 0.26 |
| 11 | 3 | ETD02077 | 100 | 0.20 |
| 12 | 3 | ETD02187 | 100 | 0.22 |
| 13 | 3 | ETD02188 | 100 | 0.16 |
| 14 | 3 | ETD02189 | 100 | 0.12 |
| 15 | 3 | ETD02190 | 100 | 0.23 |
| 16 | 3 | ETD02191 | 100 | 0.16 |
| 17 | 3 | ETD02192 | 100 | 0.15 |
| 18 | 3 | ETD02193 | 100 | 0.16 |
| 19 | 3 | ETD02194 | 100 | 0.27 |

### Example 22. Comparing the Activity of siRNAs with 2′dN or 2′F Modification Patterns at Position 9 of the Sense Strand in Mice

[0579] The activities of the siRNAs ETD02072, ETD02073, ETED02078 and ETD02080, which contain 2′deoxynucleotide, were compared to the activities of siRNAs in which the 2′deoxynucleotide was replaced with 2′F nucleotide. The siRNA sequences are shown in Table 30, where Nf is a 2′-fluoro-modified nucleoside, n is a 2′-O-methyl modified nucleoside, “d” is a deoxynucleoside, and “s” is a phosphorothioate linkage. All siRNAs contained the GalNAc ligand ETL17. Base sequences are shown in Table 31.

[0580] Six- to eight-week-old female mice (strain ICR, n=3) were given a subcutaneous injection on Day 0 of a single 100 μg dose of a GalNAc-conjugated siRNA or PBS as vehicle control.

[0581] Mice were euthanized on Day 14 after injection and a liver sample from each was collected and placed in RNAlater (ThermoFisher Catalog #AM7020) until processing. Total liver RNA was prepared by homogenizing the liver tissue in homogenization buffer (Maxwell RSC simplyRNA Tissue Kit) using a Percellys 24 tissue homogenizer (Bertin Instruments) set at 5000 rpm for two 10 second cycles. Total RNA from the lysate was purified on a Maxwell RSC 48 platform (Promega Corporation) according to the manufacturer's recommendations. Preparation of cDNA was performed using Quanta qScript cDNA SuperMix (VWR, Catalog #95048-500) according to the manufacturer's instructions. The relative levels of liver MTRES1 mRNA were assessed by RT-qPCR in triplicate on a QuantStudio™ 6 Pro Real-Time PCR System using TaqMan assays for mouse MTRES1 (ThermoFisher, assay #Mm01229834_m1) and the mouse housekeeping gene PPIA (ThermoFisher, assay #Mm02342430_g1) and PerfeCTa® qPCR FastMix®, Low ROX™ (VWR, Catalog #101419-222). Data were normalized to the mean MTRES1 mRNA level in animals receiving PBS. Results are shown in Table 32. Replacement of 2′dN with a 2′F modification had differential effects on knockdown activity depending on the particular sequence of the siRNA. The mice receiving siRNA ETD02177, which possesses a 2′F at position 9 of the sense strand, showed a substantial increase in activity compared to the siRNA ETD02078 which had a with 2′dexoy at position 9 of the sense strand.

TABLE 30
Example siRNA Sequences

| | Sense | | Antisense | |
|---|---|---|---|---|
| | Strand | Sense Strand | Strand | Antisense |
| siRNA | SEQ ID | Sequence (5′-3′) | SEQ ID | Strand Sequence |
| Name | NO: | with GalNAc moiety | NO: | (5′-3′) |
| ETD02072 | 3069 | [ETL17]succuGfgAfA | 3156 | usCfsaAfgUfaUfcGf |
| | | fdTCfgauacuugasusu | | aUfuCfcAfgGfasusu |
| ETD02175 | 3070 | [ETL17]succuGfgAfA | 3157 | usCfsaAfgUfaUfcGf |
| | | fUfcgauacuugasusu | | aUfuCfcAfgGfasusu |
| ETD02073 | 3071 | [ETL 17]sccugGfaAf | 3158 | usAfscAfaGfuAfuCf |
| | | UfdCgauacuuguasusu | | gAfuUfcCfaGfgsusu |
| ETD02176 | 3072 | [ETL17]sccugGfaAfU | 3159 | usAfscAfaGfuAfuCf |
| | | fCfgauacuuguasusu | | gAfuUfcCfaGfgsusu |
| ETD02078 | 3073 | [ETL17]saagaAfaAfG | 3160 | usCfsaCfcGfuUfcUf |
| | | fdCagaacggugasusu | | gCfuUfuUfcUfususu |
| ETD02177 | 3074 | [ETL17]saagaAfaAfG | 3161 | usCfsaCfcGfuUfcUf |
| | | fCfagaacggugasusu | | gCfuUfuUfcUfususu |
| ETD02080 | 3075 | [ETL17]scagaAfcGfG | 3162 | usCfscCfaCfuUfuCf |
| | | fdTgaaagugggasusu | | aCfcGfuUfcUfgsusu |
| ETD02178 | 3076 | [ETL17]scagaAfcGfG | 3163 | usCfscCfaCfuUfuCf |
| | | fUfgaaagugggasusu | | aCfcGfuUfcUfgsusu |

TABLE 31
Example siRNA BASE Sequences

| | SEQ | Sense Strand | SEQ | Antisense Strand |
|---|---|---|---|---|
| siRNA | ID | Base Sequence | ID | Base Sequence |
| Name | NO: | (5′ to 3′) | NO: | (5′ to 3′) |
| ETD02072 | 2739 | UCCUGGAATCGAUACUUGAUU | 2921 | UCAAGUAUCGAUUCCAGGAUU |
| ETD02175 | 2740 | UCCUGGAAUCGAUACUUGAUU | 2922 | UCAAGUAUCGAUUCCAGGAUU |
| ETD02073 | 2741 | CCUGGAAUCGAUACUUGUAUU | 2923 | UACAAGUAUCGAUUCCAGGUU |
| ETD02176 | 2742 | CCUGGAAUCGAUACUUGUAUU | 2924 | UACAAGUAUCGAUUCCAGGUU |
| ETD02078 | 2743 | AAGAAAAGCAGAACGGUGAUU | 2925 | UCACCGUUCUGCUUUUCUUUU |
| ETD02177 | 2744 | AAGAAAAGCAGAACGGUGAUU | 2926 | UCACCGUUCUGCUUUUCUUUU |
| ETD02080 | 2745 | CAGAACGGTGAAAGUGGGAUU | 2927 | UCCCACUUUCACCGUUCUGUU |
| ETD02178 | 2746 | CAGAACGGUGAAAGUGGGAUU | 2928 | UCCCACUUUCACCGUUCUGUU |
| | | | | Antisense Strand |
| | SEQ | Sense Strand Base | SEQ | Base Sequence |
| siRNA | ID | Sequence (5′ to 3′), | ID | (5′ to 3′), without |
| Name | NO: | without 3′ overhangs | NO: | 3′ overhangs |
| ETD02072 | 2748 | UCCUGGAATCGAUACUUGA | 2930 | UCAAGUAUCGAUUCCAGGA |
| ETD02175 | 2749 | UCCUGGAAUCGAUACUUGA | 2931 | UCAAGUAUCGAUUCCAGGA |
| ETD02073 | 2750 | CCUGGAAUCGAUACUUGUA | 2932 | UACAAGUAUCGAUUCCAGG |
| ETD02176 | 2751 | CCUGGAAUCGAUACUUGUA | 2933 | UACAAGUAUCGAUUCCAGG |
| ETD02078 | 2752 | AAGAAAAGCAGAACGGUGA | 2934 | UCACCGUUCUGCUUUUCUU |
| ETD02177 | 2753 | AAGAAAAGCAGAACGGUGA | 2935 | UCACCGUUCUGCUUUUCUU |
| ETD02080 | 2754 | CAGAACGGTGAAAGUGGGA | 2936 | UCCCACUUUCACCGUUCUG |
| ETD02178 | 2755 | CAGAACGGUGAAAGUGGGA | 2937 | UCCCACUUUCACCGUUCUG |

TABLE 32
Relative MTRES1 mRNA Levels in Livers of Mice

| | | | Dose | Mean MTRES1 mRNA (Normalized |
|---|---|---|---|---|
| Group | n | Treatment | (ug) | to Group 1, Day 14) |
| 1 | 3 | PBS | | 1.00 |
| 2 | 3 | ETD02072 | 100 | 0.30 |
| 3 | 3 | ETD02175 | 100 | 0.49 |
| 4 | 3 | ETD02073 | 100 | 1.22 |
| 5 | 3 | ETD02176 | 100 | 0.92 |
| 6 | 3 | ETD02078 | 100 | 0.53 |
| 7 | 3 | ETD02177 | 100 | 0.09 |
| 8 | 3 | ETD02080 | 100 | 1.05 |
| 9 | 3 | ETD02178 | 100 | 1.50 |

### Example 23. Screening Additional siRNAs Targeting at Least Human and Mouse MTRES1 in Mice

[0582] Five additional siRNAs, ETD02349 through ETD02353, designed to be cross-reactive with at least human and mouse MTRES1 mRNA, were tested for activity in mice. The siRNAs contained the GalNAc ligand ETL17. The siRNA sequences are shown in Table 33, where Nf is a 2′-fluoro-modified nucleoside, n is a 2′-O-methyl modified nucleoside, “d” is a deoxynucleoside, and “s” is a phosphorothioate linkage. Base sequences are shown in Table 34.

[0583] Six- to eight-week-old female mice (strain ICR, n=3) were given a subcutaneous injection on Day 0 of a single 100 μg dose of a GalNAc-conjugated siRNA or PBS as vehicle control. Mice receiving with ETD02182 and ETD02189 were included as positive controls.

[0584] Mice were euthanized on Day 14 after injection and a liver sample from each was collected and placed in RNAlater (ThermoFisher Catalog #AM7020) until processing. Total liver RNA was prepared by homogenizing the liver tissue in homogenization buffer (Maxwell RSC simplyRNA Tissue Kit) using a Percellys 24 tissue homogenizer (Bertin Instruments) set at 5000 rpm for two 10 second cycles. Total RNA from the lysate was purified on a Maxwell RSC 48 platform (Promega Corporation) according to the manufacturer's recommendations. Preparation of cDNA was performed using Quanta qScript cDNA SuperMix (VWR, Catalog #95048-500) according to the manufacturer's instructions. The relative levels of liver MTRES1 mRNA were assessed by RT-qPCR in triplicate on a QuantStudio™ 6 Pro Real-Time PCR System using TaqMan assays for mouse MTRES1 (ThermoFisher, assay #Mm01229834_m1) and the mouse housekeeping gene PPIA (ThermoFisher, assay #Mm02342430_g1) and PerfeCTa® qPCR FastMix®, Low ROX™ (VWR, Catalog #101419-222). Data were normalized to the mean MTRES1 mRNA level in animals receiving PBS. Results are shown in Table 35. Of the siRNAs ETD02349 through ETD02353, Mice receiving ETED02352 had the highest level of mean MTRES1 mRNA knockdown in the liver of the additional siRNAs.

TABLE 33
Example siRNA Sequences

| | Sense | | Antisense | |
|---|---|---|---|---|
| | Strand | Sense Strand | Strand | Antisense |
| siRNA | SEQ ID | Sequence (5′-3′) | SEQ ID | Strand Sequence |
| Name | NO: | with GalNAc moiety | NO: | (5′-3′) |
| ETD02182 | 3077 | [ETL17]sucuacAfAfAfGfGfug | 3164 | usUfsgagUfuCfaCfcUfuUfgUf |
| | | aacucaasusu | | aGfasusu |
| ETD02189 | 3078 | [ETL17]sgaagAfAfAfAfGfcag | 3165 | usAfsccgUfuCfuGfcUfuUfuCf |
| | | aacgguasusu | | uUfcsusu |
| ETD02349 | 3079 | [ETL17]saucgaUfaCfUfuguauu | 3166 | usAfsaAfaAfuAfcAfaGfuAfu |
| | | | | CfgAfususu |
| ETD02350 | 3080 | [ETL17]sagacUfcCfCfdAgGfg | 3167 | usUfsaAfaAfgCfcCfuGfgGfa |
| | | | | GfuCfususu |
| ETD02351 | 3081 | [ETL17]sugcuUfuCfUfdAcAfa | 3168 | usUfscAfcCfuUfuGfuAfgAfa |
| | | aggugaasusu | | AfgCfasusu |
| ETD02352 | 3082 | [ETL17]suacaAfaGfGfdTgAfa | 3169 | usCfscUfgAfgUfuCfaCfcUfu |
| | | cucaggasusu | | UfgUfasusu |
| ETD02353 | 3083 | [ETL17]sagcaGfaAfcGfGfugaa | 3170 | usCfsaCfuUfuCfaCfcGfuUfc |
| | | agugasusu | | UfgCfususu |

TABLE 34
Example siRNA BASE Sequences

| | | Sense Strand | | Antisense Strand |
|---|---|---|---|---|
| SiRNA | SEQ ID | Base Sequence | SEQ ID | Base Sequence |
| Name | NO: | (5′ to 3′) | NO: | (5′ to 3′) |
| ETD02182 | 2756 | UCUACAAAGGUGAACUCAAUU | 2938 | UUGAGUUCACCUUUGUAGAUU |
| ETD02189 | 2757 | GAAGAAAAGCAGAACGGUAUU | 2939 | UACCGUUCUGCUUUUCUUCUU |
| ETD02349 | 2758 | AUCGAUACUUGUAUUUUUAUU | 2940 | UAAAAAUACAAGUAUCGAUUU |
| ETD02350 | 2759 | AGACUCCCAGGGCUUUUAAUU | 2941 | UUAAAAGCCCUGGGAGUCUUU |
| ETD02351 | 2760 | UGCUUUCUACAAAGGUGAAUU | 2942 | UUCACCUUUGUAGAAAGCAUU |
| ETD02352 | 2761 | UACAAAGGTGAACUCAGGAUU | 2943 | UCCUGAGUUCACCUUUGUAUU |
| ETD02353 | 2762 | AGCAGAACGGUGAAAGUGAUU | 2944 | UCACUUUCACCGUUCUGCUUU |
| | | Sense Strand Base | | Sense Strand Base |
| siRNA | SEQ ID | Sequence (5′ to 3′), | SEQ ID | Sequence (5′ to 3′), |
| Name | NO: | without 3′ overhangs | NO: | without 3′ overhangs |
| ETD02182 | 2764 | UCUACAAAGGUGAACUCAA | 2946 | UUGAGUUCACCUUUGUAGA |
| ETD02189 | 2765 | GAAGAAAAGCAGAACGGUA | 2947 | UACCGUUCUGCUUUUCUUC |
| ETD02349 | 2766 | AUCGAUACUUGUAUUUUUA | 2948 | UAAAAAUACAAGUAUCGAU |
| ETD02350 | 2767 | AGACUCCCAGGGCUUUUAA | 2949 | UUAAAAGCCCUGGGAGUCU |
| ETD02351 | 2768 | UGCUUUCUACAAAGGUGAA | 2950 | UUCACCUUUGUAGAAAGCA |
| ETD02352 | 2769 | UACAAAGGTGAACUCAGGA | 2951 | UCCUGAGUUCACCUUUGUA |
| ETD02353 | 2770 | AGCAGAACGGUGAAAGUGA | 2952 | UCACUUUCACCGUUCUGCU |

TABLE 35
Relative MTRES1 mRNA Levels in Livers of Mice

| | | | Dose | Mean MTRES1 mRNA (Normalized |
|---|---|---|---|---|
| Group | n | Treatment | (ug) | to Group 1, Day 14) |
| 1 | 3 | PBS | | 1.00 |
| 2 | 3 | ETD02182 | 100 | 0.04 |
| 3 | 3 | ETD02189 | 100 | 0.05 |
| 4 | 3 | ETD02349 | 100 | 1.16 |
| 5 | 3 | ETD02350 | 100 | 0.81 |
| 6 | 3 | ETD02351 | 100 | 0.66 |
| 7 | 3 | ETD02352 | 100 | 0.17 |
| 8 | 3 | ETD02353 | 100 | 0.66 |

### Example 24. Determining the Activity of siRNAs ETD02075 and ETD02077 and siRNAs of the Same Base Sequences with Alternative Modifications Targeting Human MTRES1 mRNA in Mice Transfected with AAV8-TBG-h-MTRES1

[0585] ETD02075 and ETD02077 and siRNAs of the same base sequences containing alternative modifications were tested for activity in mice following transfection with an adeno-associated viral vector expressing human MTRES1. The siRNAs were attached to the GalNAc ligand ETL17. The siRNA sequences are shown in Table 36, where “Nf” is a 2′-fluoro-modified nucleoside, “n” is a 2′-O-methyl modified nucleoside, and “s” is a phosphorothioate linkage. Base sequences are shown in Table 37.

[0586] Six- to eight-week-old female mice (C57Bl/6) were injected with 5 μL of a recombinant adeno-associated virus 8 (AAV8) vector (1.4×10E13 genome copies/mL) by the retroorbital route on Day-14. The recombinant AAV8 contained the open reading frame and the majority of the 3′UTR of the human MTRES1 sequence (NM_016487.5) under the control of the human thyroxine binding globulin promoter in an AAV2 backbone packaged in AAV8 capsid (AAV8-TBG-h-MTRES1). On Day 0, infected mice (n=8) were given a subcutaneous injection of a single 100 μg dose of a GalNAc-conjugated siRNA or PBS as vehicle control.

[0587] Mice were euthanized on Day 14 after subcutaneous injection and a liver sample from each was collected and placed in RNAlater (ThermoFisher Catalog #AM7020) until processing. Total liver RNA was prepared by homogenizing the liver tissue in homogenization buffer (Maxwell RSC simplyRNA Tissue Kit) using a Percellys 24 tissue homogenizer (Bertin Instruments) set at 5000 rpm for two 10 second cycles. Total RNA from the lysate was purified on a Maxwell RSC 48 platform (Promega Corporation) according to the manufacturer's recommendations. Preparation of cDNA was performed using Quanta qScript cDNA SuperMix (VWR, Catalog #95048-500) according to the manufacturer's instructions. The relative levels of liver MTRES1 mRNA were assessed by RT-qPCR in triplicate on a QuantStudio™ 6 Pro Real-Time PCR System using TaqMan assays for human MTRES1 (ThermoFisher, assay #Hs01568158_g1) and the mouse housekeeping gene PPIA (ThermoFisher, assay #Mm02342430_g1) and PerfeCTa® qPCR FastMix®, Low ROX™ (VWR, Catalog #101419-222). Data were normalized to the mean MTRES1 mRNA level in animals receiving PBS. Results are shown in Table 38. Mice injected with ETD02077, ETD02192, ETD02075, ETD02182, ETD02183 and ETD02185 had reductions in mean liver MTRES1 mRNA relative to mice receiving PBS.

TABLE 36
Example siRNA Sequences

| | Sense | | Antisense | |
|---|---|---|---|---|
| | Strand | Sense Strand | Strand | Antisense Strand |
| siRNA | SEQ ID | Sequence (5′-3′) | SEQ ID | Sequence |
| Name | NO: | with GalNAc moiety | NO: | (5′-3′) |
| ETD02077 | 3084 | [ETL17]sgaagAfAfAfAfGfcag | 3171 | usAfscCfgUfuCfuGfcUfuUfu |
| | | aacgguasusu | | CfuUfcsusu |
| ETD02189 | 3085 | [ETL17]sgaagAfAfAfAfGfcag | 3172 | usAfsccgUfuCfuGfcUfuUfuCf |
| | | aacgguasusu | | uUfcsusu |
| ETD02192 | 3086 | [ETL17]sgaagAfAfAfAfGfcag | 3174 | usAfsccGfuUfcuGfcUfuUfuCf |
| | | aacgguasusu | | uUfcsusu |
| ETD02075 | 3087 | [ETL17]sucuacAfAfAfGfGfug | 3175 | usUfsgAfgUfuCfaCfcUfuUfg |
| | | aacucaasusu | | UfaGfasusu |
| ETD02182 | 3088 | [ETL17]sucuacAfAfAfGfGfug | 3176 | usUfsgagUfuCfaCfcUfuUfgUf |
| | | aacucaasusu | | aGfasusu |
| ETD02183 | 3089 | [ETL17]sucuacAfAfAfGfGfug | 3177 | usUfsgaGfuUfcaCfcUfuUfgUf |
| | | aacucaasusu | | aGfasusu |
| ETD02185 | 3090 | [ETL17]sucuacAfAfAfGfGfug | 3178 | usUfsgAfguUfcAfccuuUfgUfa |
| | | aacucaasusu | | Gfasusu |

TABLE 37
Example siRNA BASE Sequences

| | | Sense Strand | | Antisense Strand |
|---|---|---|---|---|
| siRNA | SEQ ID | Base Sequence | SEQ ID | Base Sequence |
| Name | NO: | (5′ to 3′) | NO: | (5′ to 3′) |
| ETD02077 | 2771 | GAAGAAAAGCAGAACGGUAUU | 2953 | UACCGUUCUGCUUUUCUUCUU |
| ETD02189 | 2772 | GAAGAAAAGCAGAACGGUAUU | 2954 | UACCGUUCUGCUUUUCUUCUU |
| ETD02192 | 2773 | GAAGAAAAGCAGAACGGUAUU | 2955 | UACCGUUCUGCUUUUCUUCUU |
| ETD02075 | 2774 | UCUACAAAGGUGAACUCAAUU | 2956 | UUGAGUUCACCUUUGUAGAUU |
| ETD02182 | 2775 | UCUACAAAGGUGAACUCAAUU | 2957 | UUGAGUUCACCUUUGUAGAUU |
| ETD02183 | 2776 | UCUACAAAGGUGAACUCAAUU | 2958 | UUGAGUUCACCUUUGUAGAUU |
| ETD02185 | 2777 | UCUACAAAGGUGAACUCAAUU | 2959 | UUGAGUUCACCUUUGUAGAUU |
| | | Sense Strand Base | | Sense Strand Base |
| siRNA | SEQ ID | Sequence (5′ to 3′), | SEQ ID | Sequence (5′ to 3′), |
| name | NO: | without 3′ overhangs | NO: | without 3′ overhangs |
| ETD02077 | 2779 | GAAGAAAAGCAGAACGGUA | 2961 | UACCGUUCUGCUUUUCUUC |
| ETD02189 | 2780 | GAAGAAAAGCAGAACGGUA | 2962 | UACCGUUCUGCUUUUCUUC |
| ETD02192 | 2781 | GAAGAAAAGCAGAACGGUA | 2963 | UACCGUUCUGCUUUUCUUC |
| ETD02075 | 2782 | UCUACAAAGGUGAACUCAA | 2964 | UUGAGUUCACCUUUGUAGA |
| ETD02182 | 2783 | UCUACAAAGGUGAACUCAA | 2965 | UUGAGUUCACCUUUGUAGA |
| ETD02183 | 2784 | UCUACAAAGGUGAACUCAA | 2966 | UUGAGUUCACCUUUGUAGA |
| ETD02185 | 2785 | UCUACAAAGGUGAACUCAA | 2967 | UUGAGUUCACCUUUGUAGA |

TABLE 38
Relative MTRES1 mRNA Levels in Livers of Mice

| | | | Dose | Mean MTRES1 mRNA (Normalized |
|---|---|---|---|---|
| Group | n | Treatment | (ug) | to Group 1, Day 14) |
| 1 | 8 | PBS | | 1.00 |
| 2 | 8 | ETD02077 | 100 | 0.72 |
| 3 | 8 | ETD02189 | 100 | 1.38 |
| 4 | 8 | ETD02192 | 100 | 0.62 |
| 5 | 8 | ETD02075 | 100 | 0.34 |
| 6 | 8 | ETD02182 | 100 | 0.08 |
| 7 | 8 | ETD02183 | 100 | 0.44 |
| 8 | 8 | ETD02185 | 100 | 0.21 |

### Example 25. Screening Additional siRNAs Targeting Human MTRES1 mRNA in Mice Transfected with AAV8-TBG-h-MTRES1

[0588] Additional siRNAs targeting human MTRES1 mRNA and cross-reactive with at least cynomolgus monkey MTRES1 mRNA will be tested for activity in mice following transfection with an adeno-associated viral vector. The siRNAs are conjugated to the GalNAc ligand ETL17. The siRNA sequences are shown in Tables 39 and 40, where “Nf” is a 2′-fluoro-modified nucleoside, “n” is a 2′-O-methyl modified nucleoside, and “s” is a phosphorothioate linkage.

[0589] Six- to eight-week-old female mice (C57Bl/6) will be injected with 5 μL of a recombinant adeno-associated virus 8 (AAV8) vector (1.4×10E13 genome copies/mL) by the retroorbital route on Day-14. The recombinant AAV8 contained the open reading frame and the majority of the 3′UTR of the human MTRES1 sequence (NM_016487.5) under the control of the human thyroxine binding globulin promoter in an AAV2 backbone packaged in AAV8 capsid (AAV8-TBG-h-MTRES1). On Day 0, infected mice (n=8) will be given a subcutaneous injection of a single 100 μg dose of a GalNAc-conjugated siRNA or PBS as vehicle control.

[0590] Mice will be euthanized on Day 14 after subcutaneous injection and a liver sample from each will be collected and placed in RNAlater (ThermoFisher Catalog #AM7020) until processing. Total liver RNA will be prepared by homogenizing the liver tissue in homogenization buffer (Maxwell RSC simplyRNA Tissue Kit) using a Percellys 24 tissue homogenizer (Bertin Instruments) set at 5000 rpm for two 10 second cycles. Total RNA from the lysate will be purified on a Maxwell RSC 48 platform (Promega Corporation) according to the manufacturer's recommendations. Preparation of cDNA will be performed using Quanta qScript cDNA SuperMix (VWR, Catalog #95048-500) according to the manufacturer's instructions. The relative levels of liver MTRES1 mRNA will be assessed by RT-qPCR in triplicate on a QuantStudio™ 6 Pro Real-Time PCR System using TaqMan assays for human MTRES1 (ThermoFisher, assay #Hs01568158_g1) and the mouse housekeeping gene PPIA (ThermoFisher, assay #Mm02342430_g1) and PerfeCTaR qPCR FastMix®, Low ROX™ (VWR, Catalog #101419-222). Data will be normalized to the mean MTRES1 mRNA level in animals receiving PBS.

TABLE 39
Example siRNA Sequences

| | Sense | | Antisense | |
|---|---|---|---|---|
| | Strand | Sense Strand | Strand | |
| siRNA | SEQ ID | Sequence (5′-3′) | SEQ ID | Antisense Strand Sequence |
| Name | NO: | with GalNAc moiety | NO: | (5′-3′) |
| ETD02354 | 3091 | [ETL17]suggcuAfGfuGfuuaaau | 3179 | usGfscAfaUfuUfaAfcAfcUfa |
| | | ugcasusu | | GfcCfasusu |
| ETD02355 | 3092 | [ETL17]sggcuagUfgUfUfaaauu | 3180 | usAfsgCfaAfuUfuAfaCfaCfu |
| | | gcuasusu | | AfgCfcsusu |
| ETD02356 | 3093 | [ETL17]sgcuagUfgUfUfaaauug | 3181 | usAfsaGfcAfaUfuUfaAfcAfc |
| | | cuuasusu | | UfaGfcsusu |
| ETD02357 | 3094 | [ETL17]scggugUfUfUfUfaagaa | 3182 | usGfsgCfuUfuCfuUfaAfaAfc |
| | | agccasusu | | AfcCfgsusu |
| ETD02358 | 3095 | [ETL17]sguacUfUfCfCfUfggaa | 3183 | usAfsuCfgAfuUfcCfaGfgAfa |
| | | ucgauasusu | | GfuAfcsusu |
| ETD02359 | 3096 | [ETL17]scaaguuAfcGfuGfcacc | 3184 | usUfsuUfgGfuGfcAfcGfuAfa |
| | | aaaasusu | | CfuUfgsusu |
| ETD02360 | 3097 | [ETL17]saaguUfaCfgUfgCfacc | 3185 | usAfsuUfuGfgUfgCfaCfgUfa |
| | | aaauasusu | | AfcUfususu |
| ETD02361 | 3098 | [ETL17]sguuaCfgUfgCfaCfcaa | 3186 | usUfsaAfuUfuGfgUfgCfaCfg |
| | | | | UfaAfcsusu |
| ETD02362 | 3099 | [ETL17]sauauUfUfUfCfUfcacu | 3187 | usGfsuCfuCfaGfuGfaGfaAfa |
| | | gagacasusu | | AfuAfususu |
| ETD02363 | 3100 | [ETL17]sgucuAfcAfAfAfAfuc | 3188 | usUfsuAfgUfaGfaUfuUfuGfu |
| | | uacuaaasusu | | AfgAfcsusu |
| ETD02364 | 3101 | [ETL17]sagucUfUfUfUfCfggu | 3189 | usCfsaUfcAfuAfcCfgAfaAfa |
| | | augaugasusu | | GfaCfususu |
| ETD02365 | 3102 | [ETL17]sggcuAfgAfuAfuuggg | 3190 | usUfsuCfuCfcCfaAfuAfuCfu |
| | | agaaasusu | | AfgCfcsusu |
| ETD02366 | 3103 | [ETL17]sagauAfuuGfGfGfAfg | 3191 | usUfsuGfuUfuCfuCfcCfaAfu |
| | | aaacaaasusu | | AfuCfususu |
| ETD02367 | 3104 | [ETL17]sgauacAfuuGfGfaucuu | 3192 | usGfsaGfaAfgAfuCfcAfaUfg |
| | | cucasusu | | UfaUfcsusu |
| ETD02368 | 3105 | [ETL17]sucuuCfuCfaUfUfggag | 3193 | usUfscCfuCfuCfcAfaUfgAfg |
| | | aggaasusu | | AfaGfasusu |
| ETD02369 | 3106 | [ETL17]scucauuGfGfAfGfAfg | 3194 | usUfsuUfaUfcCfuCfuCfcAfa |
| | | gauaaaasusu | | UfgAfgsusu |
| ETD02370 | 3107 | [ETL17]sggauAfaAfGfAfAfgc | 3195 | usGfsuUfcCfuGfcUfuCfuUfu |
| | | aggaacasusu | | AfuCfcsusu |
| ETD02371 | 3108 | [ETL17]sagagaCfagUfUfaugcg | 3196 | usAfsuCfcGfcAfuAfaCfuGfu |
| | | gauasusu | | CfuCfususu |
| ETD02372 | 3109 | [ETL17]sagacAfGfuuAfuGfcg | 3197 | usGfsaAfuCfcGfcAfuAfaCfu |
| | | gauucasusu | | GfuCfususu |
| ETD02373 | 3110 | [ETL17]scaguUfaUfgCfggauuc | 3198 | usAfsgAfgAfaUfcCfgCfaUfa |
| | | ucuasusu | | AfcUfgsusu |
| ETD02374 | 3111 | [ETL17]suuauGfcGfgAfuucucu | 3199 | usUfscAfaGfaGfaAfuCfcGfc |
| | | ugaasusu | | AfuAfasusu |
| ETD02375 | 3112 | [ETL17]sgcggaUfUfCfUfcUfu | 3200 | usUfsuUfuUfcAfaGfaGfaAfu |
| | | gaaaaaasusu | | CfcGfcsusu |
| ETD02376 | 3113 | [ETL17]sagugAfaAfaAfuAfcag | 3201 | usCfsaCfuCfuGfuAfuUfuUfu |
| | | agugasusu | | CfaCfususu |
| ETD02377 | 3114 | [ETL17]sggcgGfuGfgAfaAfag | 3202 | usUfsuAfaAfcUfuUfuCfcAfc |
| | | uuuaaasusu | | CfgCfcsusu |
| ETD02378 | 3115 | [TL17]sgcgguGfGfAfAfaAfg | 3203 | usUfsuUfaAfaCfuUfuUfcCfa |
| | | uuuaaaasusu | | CfcGfcsusu |
| ETD02379 | 3116 | [ETL17]sguuuAfaAfGfdTuGfc | 3204 | usUfscUfuAfgGfcAfaCfuUfu |
| | | cuaagaasusu | | AfaAfcsusu |
| ETD02380 | 3117 | [ETL17]sagcugCfUfuUfcUfagu | 3205 | usUfsaCfcAfcUfaGfaAfaGfc |
| | | gguaasusu | | AfgCfususu |

TABLE 40
Example siRNA BASE Sequences

| | | Sense Strand | | Antisense Strand |
|---|---|---|---|---|
| siRNA | SEQ ID | Base Sequence | SEQ ID | Base Sequence |
| Name | NO: | (5′ to 3′) | NO: | (5′ to 3′) |
| ETD02354 | 2786 | UGGCUAGUGUUAAAUUGCAUU | 2968 | UGCAAUUUAACACUAGCCAUU |
| ETD02355 | 2787 | GGCUAGUGUUAAAUUGCUAUU | 2969 | UAGCAAUUUAACACUAGCCUU |
| ETD02356 | 2788 | GCUAGUGUUAAAUUGCUUAUU | 2970 | UAAGCAAUUUAACACUAGCUU |
| ETD02357 | 2789 | CGGUGUUUUAAGAAAGCCAUU | 2971 | UGGCUUUCUUAAAACACCGUU |
| ETD02358 | 2790 | GUACUUCCUGGAAUCGAUAUU | 2972 | UAUCGAUUCCAGGAAGUACUU |
| ETD02359 | 2791 | CAAGUUACGUGCACCAAAAUU | 2973 | UUUUGGUGCACGUAACUUGUU |
| ETD02360 | 2792 | AAGUUACGUGCACCAAAUAUU | 2974 | UAUUUGGUGCACGUAACUUUU |
| ETD02361 | 2793 | GUUACGUGCACCAAAUUAAUU | 2975 | UUAAUUUGGUGCACGUAACUU |
| ETD02362 | 2794 | AUAUUUUCUCACUGAGACAUU | 2976 | UGUCUCAGUGAGAAAAUAUUU |
| ETD02363 | 2795 | GUCUACAAAAUCUACUAAAUU | 2977 | UUUAGUAGAUUUUGUAGACUU |
| ETD02364 | 2796 | AGUCUUUUCGGUAUGAUGAUU | 2978 | UCAUCAUACCGAAAAGACUUU |
| ETD02365 | 2797 | GGCUAGAUAUUGGGAGAAAUU | 2979 | UUUCUCCCAAUAUCUAGCCUU |
| ETD02366 | 2798 | AGAUAUUGGGAGAAACAAAUU | 2980 | UUUGUUUCUCCCAAUAUCUUU |
| ETD02367 | 2799 | GAUACAUUGGAUCUUCUCAUU | 2981 | UGAGAAGAUCCAAUGUAUCUU |
| ETD02368 | 2800 | UCUUCUCAUUGGAGAGGAAUU | 2982 | UUCCUCUCCAAUGAGAAGAUU |
| ETD02369 | 2801 | CUCAUUGGAGAGGAUAAAAUU | 2983 | UUUUAUCCUCUCCAAUGAGUU |
| ETD02370 | 2802 | GGAUAAAGAAGCAGGAACAUU | 2984 | UGUUCCUGCUUCUUUAUCCUU |
| ETD02371 | 2803 | AGAGACAGUUAUGCGGAUAUU | 2985 | UAUCCGCAUAACUGUCUCUUU |
| ETD02372 | 2804 | AGACAGUUAUGCGGAUUCAUU | 2986 | UGAAUCCGCAUAACUGUCUUU |
| ETD02373 | 2805 | CAGUUAUGCGGAUUCUCUAUU | 2987 | UAGAGAAUCCGCAUAACUGUU |
| ETD02374 | 2806 | UUAUGCGGAUUCUCUUGAAUU | 2988 | UUCAAGAGAAUCCGCAUAAUU |
| ETD02375 | 2807 | GCGGAUUCUCUUGAAAAAAUU | 2989 | UUUUUUCAAGAGAAUCCGCUU |
| ETD02376 | 2808 | AGUGAAAAAUACAGAGUGAUU | 2990 | UCACUCUGUAUUUUUCACUUU |
| ETD02377 | 2809 | GGCGGUGGAAAAGUUUAAAUU | 2991 | UUUAAACUUUUCCACCGCCUU |
| ETD02378 | 2810 | GCGGUGGAAAAGUUUAAAAUU | 2992 | UUUUAAACUUUUCCACCGCUU |
| ETD02379 | 2811 | GUUUAAAGTUGCCUAAGAAUU | 2993 | UUCUUAGGCAACUUUAAACUU |
| ETD02380 | 2812 | AGCUGCUUUCUAGUGGUAAUU | 2994 | UUACCACUAGAAAGCAGCUUU |
| | | Sense Strand Base | | Sense Strand Base |
| SiRNA | SEQ ID | Sequence (5′ to 3′), | SEQ ID | Sequence (5′ to 3′), |
| Name | NO: | without 3′ overhangs | NO: | without 3′ overhangs |
| ETD02354 | 2814 | UGGCUAGUGUUAAAUUGCA | 2996 | UGCAAUUUAACACUAGCCA |
| ETD02355 | 2815 | GGCUAGUGUUAAAUUGCUA | 2997 | UAGCAAUUUAACACUAGCC |
| ETD02356 | 2816 | GCUAGUGUUAAAUUGCUUA | 2998 | UAAGCAAUUUAACACUAGC |
| ETD02357 | 2817 | CGGUGUUUUAAGAAAGCCA | 2999 | UGGCUUUCUUAAAACACCG |
| ETD02358 | 2818 | GUACUUCCUGGAAUCGAUA | 3000 | UAUCGAUUCCAGGAAGUAC |
| ETD02359 | 2819 | CAAGUUACGUGCACCAAAA | 3001 | UUUUGGUGCACGUAACUUG |
| ETD02360 | 2820 | AAGUUACGUGCACCAAAUA | 3002 | UAUUUGGUGCACGUAACUU |
| ETD02361 | 2821 | GUUACGUGCACCAAAUUAA | 3003 | UUAAUUUGGUGCACGUAAC |
| ETD02362 | 2822 | AUAUUUUCUCACUGAGACA | 3004 | UGUCUCAGUGAGAAAAUAU |
| ETD02363 | 2823 | GUCUACAAAAUCUACUAAA | 3005 | UUUAGUAGAUUUUGUAGAC |
| ETD02364 | 2824 | AGUCUUUUCGGUAUGAUGA | 3006 | UCAUCAUACCGAAAAGACU |
| ETD02365 | 2825 | GGCUAGAUAUUGGGAGAAA | 3007 | UUUCUCCCAAUAUCUAGCC |
| ETD02366 | 2826 | AGAUAUUGGGAGAAACAAA | 3008 | UUUGUUUCUCCCAAUAUCU |
| ETD02367 | 2827 | GAUACAUUGGAUCUUCUCA | 3009 | UGAGAAGAUCCAAUGUAUC |
| ETD02368 | 2828 | UCUUCUCAUUGGAGAGGAA | 3010 | UUCCUCUCCAAUGAGAAGA |
| ETD02369 | 2829 | CUCAUUGGAGAGGAUAAAA | 3011 | UUUUAUCCUCUCCAAUGAG |
| ETD02370 | 2830 | GGAUAAAGAAGCAGGAACA | 3012 | UGUUCCUGCUUCUUUAUCC |
| ETD02371 | 2831 | AGAGACAGUUAUGCGGAUA | 3013 | UAUCCGCAUAACUGUCUCU |
| ETD02372 | 2832 | AGACAGUUAUGCGGAUUCA | 3014 | UGAAUCCGCAUAACUGUCU |
| ETD02373 | 2833 | CAGUUAUGCGGAUUCUCUA | 3015 | UAGAGAAUCCGCAUAACUG |
| ETD02374 | 2834 | UUAUGCGGAUUCUCUUGAA | 3016 | UUCAAGAGAAUCCGCAUAA |
| ETD02375 | 2835 | GCGGAUUCUCUUGAAAAAA | 3017 | UUUUUUCAAGAGAAUCCGC |
| ETD02376 | 2836 | AGUGAAAAAUACAGAGUGA | 3018 | UCACUCUGUAUUUUUCACU |
| ETD02377 | 2837 | GGCGGUGGAAAAGUUUAAA | 3019 | UUUAAACUUUUCCACCGCC |
| ETD02378 | 2838 | GCGGUGGAAAAGUUUAAAA | 3020 | UUUUAAACUUUUCCACCGC |
| ETD02379 | 2839 | GUUUAAAGTUGCCUAAGAA | 3021 | UUCUUAGGCAACUUUAAAC |
| ETD02380 | 2840 | AGCUGCUUUCUAGUGGUAA | 3022 | UUACCACUAGAAAGCAGCU |

### Example 26. Screening MTRES1 siRNAs Derived from ETD01955 with Alternative Modification Patterns in Mice

[0591] The base sequence of ETD01955 was synthesized with alternative modification patterns and then these were tested for activity in mice. The siRNA sequences are shown in Table 41, where Nf is a 2′-fluoro-modified nucleoside, n is a 2′-O-methyl modified nucleoside, and “s” is a phosphorothioate linkage. All siRNAs were conjugated to the GalNAc ligand ETL17. Base sequences are shown in Table 42.

[0592] Six- to eight-week-old female mice (strain ICR, n=3) were given a subcutaneous injection on Day 0 of a single 100 μg dose of a GalNAc-conjugated siRNA or PBS as vehicle control.

[0593] Mice were euthanized on Day 14 after injection and a liver sample from each was collected and placed in RNAlater (ThermoFisher Catalog #AM7020) until processing. Total liver RNA was prepared by homogenizing the liver tissue in homogenization buffer (Maxwell RSC simplyRNA Tissue Kit) using a Percellys 24 tissue homogenizer (Bertin Instruments) set at 5000 rpm for two 10 second cycles. Total RNA from the lysate was purified on a Maxwell RSC 48 platform (Promega Corporation) according to the manufacturer's recommendations. Preparation of cDNA was performed using Quanta qScript cDNA SuperMix (VWR, Catalog #95048-500) according to the manufacturer's instructions. The relative levels of liver MTRES1 mRNA were assessed by RT-qPCR in triplicate on a QuantStudio™ 6 Pro Real-Time PCR System using TaqMan assays for mouse MTRES1 (ThermoFisher, assay #Mm01229834_m1) and the mouse housekeeping gene PPIA (ThermoFisher, assay #Mm02342430_g1) and PerfeCTaR qPCR FastMix®, Low ROX™ (VWR, Catalog #101419-222). Data were normalized to the mean MTRES1 mRNA level in animals receiving PBS. Results are shown in Table 43. Of the alternatively modified versions of ETD01955, mice receiving ETD02106 had the highest level of mean MTRES1 mRNA knockdown in the liver.

TABLE 41
Example siRNA Sequences

| | Sense | | Antisense | |
|---|---|---|---|---|
| | Strand | Sense Strand | Strand | Antisense |
| siRNA | SEQ ID | Sequence (5′-3′) | SEQ ID | Strand Sequence |
| Name | NO: | with GalNAc moiety | NO: | (5′-3′) |
| ETD02105 | 3118 | [ETL17]scuuccuGfGf | 3206 | usAfsguaUfcGfaUfu |
| | | AfAfucgauacuasusu | | CfcAfgGfaAfgsusu |
| ETD02106 | 3119 | [ETL17]scuuccuGfGf | 3207 | usAfsguauCfgaUfuC |
| | | AfAfucgauacuasusu | | fcAfgGfaAfgsusu |
| ETD02107 | 3120 | [ETL17]scuuccuGfGf | 3208 | usAfsguauCfgAfuuC |
| | | AfAfucgauacuasusu | | fcAfgGfaAfgsusu |
| ETD02108 | 3121 | [ETL17]scuuccuGfGf | 3209 | usAfsguauCfgAfuuc |
| | | AfAfucgauacuasusu | | cAfgGfaAfgsusu |
| ETD02109 | 3122 | [ETL17]scuuccuGfG | 3210 | usAfsguAfuCfgAfuu |
| | | fAfAfucgauacuasusu | | ccAfgGfaAfgsusu |
| ETD02110 | 3123 | [ETL17]scuuccuGfGf | 3211 | usAfsgUfaUfcGfauu |
| | | AfAfucgauacuasusu | | ccAfgGfaAfgsusu |
| ETD02111 | 3124 | [ETL17]scuuccuGfGf | 3212 | usAfsguaUfcGfaUfu |
| | | AfAfucgauacuasusu | | ccAfgGfaAfgsusu |

TABLE 42
Example siRNA BASE Sequences

| | | Sense Strand | | Antisense Strand |
|---|---|---|---|---|
| siRNA | SEQ ID | Base Sequence | SEQ ID | Base Sequence |
| Name | NO: | (5′ to 3′) | NO: | (5′ to 3′) |
| ETD02105 | 2841 | CUUCCUGGAAUCGAUACUAUU | 3023 | UAGUAUCGAUUCCAGGAAGUU |
| ETD02106 | 2842 | CUUCCUGGAAUCGAUACUAUU | 3024 | UAGUAUCGAUUCCAGGAAGUU |
| ETD02107 | 2843 | CUUCCUGGAAUCGAUACUAUU | 3025 | UAGUAUCGAUUCCAGGAAGUU |
| ETD02108 | 2844 | CUUCCUGGAAUCGAUACUAUU | 3026 | UAGUAUCGAUUCCAGGAAGUU |
| ETD02109 | 2845 | CUUCCUGGAAUCGAUACUAUU | 3027 | UAGUAUCGAUUCCAGGAAGUU |
| ETD02110 | 2846 | CUUCCUGGAAUCGAUACUAUU | 3028 | UAGUAUCGAUUCCAGGAAGUU |
| ETD02111 | 2847 | CUUCCUGGAAUCGAUACUAUU | 3029 | UAGUAUCGAUUCCAGGAAGUU |
| | | Sense Strand Base | | Sense Strand Base |
| siRNA | SEQ ID | Sequence (5′ to 3′), | SEQ ID | Sequence (5′ to 3′), |
| Name | NO: | without 3′ overhangs | NO: | without 3′ overhangs |
| ETD02105 | 2849 | CUUCCUGGAAUCGAUACUA | 3031 | UAGUAUCGAUUCCAGGAAG |
| ETD02106 | 2850 | CUUCCUGGAAUCGAUACUA | 3032 | UAGUAUCGAUUCCAGGAAG |
| ETD02107 | 2851 | CUUCCUGGAAUCGAUACUA | 3033 | UAGUAUCGAUUCCAGGAAG |
| ETD02108 | 2852 | CUUCCUGGAAUCGAUACUA | 3034 | UAGUAUCGAUUCCAGGAAG |
| ETD02109 | 2853 | CUUCCUGGAAUCGAUACUA | 3035 | UAGUAUCGAUUCCAGGAAG |
| ETD02110 | 2854 | CUUCCUGGAAUCGAUACUA | 3036 | UAGUAUCGAUUCCAGGAAG |
| ETD02111 | 2855 | CUUCCUGGAAUCGAUACUA | 3037 | UAGUAUCGAUUCCAGGAAG |

TABLE 43
Relative MTRES1 mRNA Levels in Livers of Mice

| | | | Dose | Mean MTRES1 mRNA (Normalized |
|---|---|---|---|---|
| Group | n | Treatment | (ug) | to Group 1, Day 14) |
| 1 | 4 | PBS | | 1.00 |
| 2 | 4 | ETD02105 | 100 | 0.23 |
| 3 | 4 | ETD02106 | 100 | 0.18 |
| 4 | 4 | ETD02107 | 100 | 0.22 |
| 5 | 4 | ETD02108 | 100 | 0.29 |
| 6 | 4 | ETD02109 | 100 | 0.29 |
| 7 | 4 | ETD02110 | 100 | 0.50 |
| 8 | 4 | ETD02111 | 100 | 0.50 |

### Example 27: Synthesis of ETL Phosphoramidites

[chemical structure]

[chemical structure]

[0594] Synthesis of N-(4-hydroxyphenethyl) palmitamide (5): 12.82 grams of 1 (palmitic acid) were weighed out and dissolved in 450 mL of CH₂Cl₂. 16.3 mL di-isopropyl ethyl amine (DIEA) was added to the solution of 1. Afterwards, 12.88 mL of 2 (perfluorophenyl 2,2,2-trifluoroaceate, “PFP”) was added dropwise, and the reaction was stirred for 10 minutes after addition was completed. To the solution of PFP activated acid, 8.26 grams of 4 (4-(2-aminoethyl) phenol) was added via an addition funnel, and the addition funnel was rinsed with 50 mL CH₂Cl₂. The reaction was placed under Argon and stirred overnight. After stirring overnight 5 formed a precipitate. The precipitate was collected via filtration and washed with 75 mL MTBE, previously chilled to −20° C. The white to off-white solid was dried overnight under high vacuum. The product was used in the next step without further purification.

[0595] Synthesis of ETL20 phosphoramidite (6): 100 mL anhydrous ethyl acetate was added to N-(4-hydroxyphenethyl) palmitamide 5 (5.2 grams), followed by addition of 250 mg 3-Angstrom molecular sieves. The mixture was stirred for 1 hr. The mixture was heated at 50° C. to obtain a clear solution. 7.3 mL of DIEA was added, and mixture was placed into an ice bath, and the solution became cloudy. 3-((chloro(diisopropylamino)phosphaneyl)oxy) propanenitrile (3.5 mL) was slowly added to the cloudy solution. After addition was completed, the reaction mixture was removed from the ice bath and stirred at room temperature overnight under Ar. The reaction mixture was then diluted with ethyl acetate (200 mL), washed with saturated NaHCO₃ solution (2×50 mL) followed by brine (50 mL). The solution was dried over Na₂SO₄, filtered and concentrated under reduced pressure. The residue obtained was purified by silica gel column chromatography and eluted with 5-30% ethyl acetate in hexanes containing 2% triethylamine.

[0596] ETL18 (C₁₄) and ETL19 (C₁₂) phosphoramidites were synthesized using the procedure to generate ETL20 phosphoramidite with hydroxylbenzylamine and lauryl (C₁₂) or myristic (C₁₄) acids.

### Example 28: Intracerebroventricular Injections

[0597] siRNA sequences are depicted in Table 44, where Nf is a 2′-fluoro-modified nucleoside, n is a 2′-O-methyl modified nucleoside, and “s” is a phosphorothioate linkage. ETL3 is stearyl coupled to 5′ of sense strand using stearyl phosphoramidite (Glen Research, 10-1979-90), and 5VP is vinyl phosphonate at 5′ end of antisense strand using 5′-POM-vinyl phosphonate, 2′-OMe-U CE-Phosphoramidite (Biosearch Technologies, 2579). Mice were induced to anesthetic states in an induction chamber with 1.2% isoflurane vaporized by oxygen of 1.0 L/min and then transferred and fixed to a stereotaxic frame while keeping anesthetized by 0.8% isoflurane through a mask. Skull was exposed and single intracerebroventricular injections (5 μl, artificial cerebrospinal fluid as vehicle) were performed at 500 nl min⁻¹ after needle placement at the following coordinates from bregma: −0.2 mm anterior-posterior, 0.8 mm mediolateral and −2.5 mm dorsoventral using a Standard U-Frame Stereotaxic Instrument for Mouse (Harvard Apparatus 75-1808) and a Stereotaxic Anesthesia Adapters with Anesthesia Masks (Harvard Apparatus 75-1856).

TABLE 44
siRNA duplexes

| | | SEQ | | SEQ ID | |
|---|---|---|---|---|---|
| Entity # | Target | ID NO | Sense Strand | NO | Antisense Strand |
| ETD01917 | MTRES1 | 3238 | [ETL3]cuAfcAfaAfgGfuGfa | 2468 | usCfsugaGfuUfcaccuUfuGf |
| | | | AfcucAfgAfsusu | | uagsusu |
| ETD02209 | MTRES1 | 3239 | [ELT20]cuAfcAfaAfgGfuGf | 2468 | usCfsugaGfuUfcaccuUfuGf |
| | | | aAfcucAfgAfsusu | | uagsusu |
| ETD02137 | MTRES1 | 3239 | [ELT20]cuAfcAfaAfgGfuGf | 3243 | 5VPusCfsugaGfuUfcaccuU |
| | | | aAfcucAfgAfsusu | | fuGfuagsusu |
| ETD02210 | MTRES1 | 3241 | [ETL20]ucuacAfAfAfGfGfu | 3244 | 5VPusUfsgAfgUfuCfaCfc |
| | | | gaacucaasusu | | UfuUfgUfaGfasusu |
| ETD02211 | MTRES1 | 3242 | [ETL20]gaagAfAfAfAfGfca | 3245 | 5VPusAfscCfgUfuCfuGfc |
| | | | gaacgguasusu | | UfuUfuCfuUfcsusu |
| ETD02273 | MTRES1 | 3241 | [ETL20]ucuacAfAfAfGfGfu | 3246 | 5VPusUfsgagUfuCfaCfcUf |
| | | | gaacucaasusu | | uUfgUfaGfasusu |
| ETD02274 | MTRES1 | 3241 | [ETL20]ucuacAfAfAfGfGfu | 3247 | 5VPusUfsgaGfuUfcaCfcUf |
| | | | gaacucaasusu | | uUfgUfaGfasusu |
| ETD02275 | MTRES1 | 3242 | [ETL20]gaagAfAfAfAfGfca | 3248 | 5VPusAfsccgUfuCfuGfcUf |
| | | | gaacgguasusu | | uUfuCfuUfcsusu |
| ETD02276 | MTRES1 | 3241 | [ETL20]ucuacAfAfAfGfGfu | 3249 | 5VPusUfsgAfguUfcAfccuu |
| | | | gaacucaasusu | | UfgUfaGfasusu |
| ETD02319 | MTRES1 | 3242 | [ETL20]gaagAfAfAfAfGfca | 3250 | 5VPusAfsccGfuUfcuGfcUf |
| | | | gaacgguasusu | | uUfuCfuUfcsusu |

[0598] Mice were euthanized on day 14 or 28 post-injection. Brains from each animal were harvested and dissected into right and left hemispheres.

[0599] Total RNA was extracted from homogenized tissue and reverse transcribed to cDNA using a First-Strand III cDNA Synthesis kit. Normalized cDNA quantification was carried out by real-time TaqMan PCR using fluorescently labeled TaqMan assays for mouse MTRES1 (ThermoFisher, assay #Mm01229834_m1) and the mouse housekeeping gene PPIA (ThermoFisher, assay #Mm02342430_g1). Reactions were carried out in 20 μL aliquots using TaqMan Universal PCR Master Mix No AmpErase UNG ran on an ABI Prism 7500 Fast Real-Time PCR System Sequence Detection System and analyzed by the 7500 System software. Relative Quantification (RQ) values between treated and untreated samples are calculated by the formula 2-ΔΔCT, where CT is the cycle at threshold (automatic measurement), ΔCT is CT of the assayed gene (MTRES1) minus CT of the endogenous control (PPIA), and ΔΔCT is the ΔCT of the normalized assayed gene in the treated sample minus the ΔCT of the same gene in the untreated one (calibrator). Results are depicted in Tables 45-48.

TABLE 45
Relative MTRES1 mRNA Levels in Brains of Mice

| | |
|---|---|
| siRNA | Average mRNA relative to no treatment control animals |

25 μg dose

| | |
|---|---|
| ETD01917 | 0.90 |
| ETD02209 | 0.44 |

10 μg dose

| | |
|---|---|
| ETD01917 | 0.45 |
| ETD02209 | 0.22 |

TABLE 46
Relative MTRES1 mRNA Levels in Brains
of Mice 14- and 28-Days Post-Injection

| | |
|---|---|
| | Average mRNA relative to no |
| siRNA | treatment control animals |

14 days post injection

| | |
|---|---|
| ETD02209 (100 μg) | 0.20 |
| ETD02137 (100 μg) | 0.01 |

28 days post injection

| | |
|---|---|
| ETD02209 (100 μg) | 0.04 |
| ETD02137 (100 μg) | 0.03 |

TABLE 47
Relative MTRES1 mRNA Levels in Brains
of Mice 14 Days Post-Injection

| | Average mRNA relative to no |
|---|---|
| siRNA | treatment control animals |
| ETD02210 (100 μg) | 0.05 |
| ETD02211 (100 μg) | 0.02 |

TABLE 48
Relative MTRES1 mRNA Levels in Brains
of Mice 14 Days Post-Injection

| | Average mRNA relative to no |
|---|---|
| siRNA | treatment control animals |
| ETD02210 (50 μg) | 0.04 |
| ETD02211 (50 μg) | 0.38 |
| ETD02273 (50 μg) | 0.03 |
| ETD02274 (50 μg) | 0.22 |
| ETD02275 (50 μg) | 0.21 |
| ETD02276_(50 μg) | 0.19 |
| ETD02319_(50 μg) | 0.31 |

### Example 29. Screening siRNAs ETD02354-ETD02360 Targeting Human MTRES1 mRNA in Mice Transfected with AAV8-TBG-h-MTRES1

[0600] Additional siRNAs targeting human MTRES1 mRNA and cross-reactive with at least cynomolgus monkey MTRES1 mRNA were tested for activity in mice following transfection with an adeno-associated viral vector. The siRNAs are conjugated to the GalNAc ligand ETL17. The siRNA sequences are shown in Tables 49 and 50, where “Nf” is a 2′-fluoro-modified nucleoside, “n” is a 2′-O-methyl modified nucleoside, and “s” is a phosphorothioate linkage.

[0601] Six- to eight-week-old female mice (C57Bl/6) were injected with 5 μL of a recombinant adeno-associated virus 8 (AAV8) vector (1.0×10E13 genome copies/mL) by the retroorbital route on Day-14. The recombinant AAV8 contained the open reading frame and the majority of the 3′UTR of the human MTRES1 sequence (NM_016487.5) under the control of the human thyroxine binding globulin promoter in an AAV2 backbone packaged in AAV8 capsid (AAV8-TBG-h-MTRES1). On Day 0, infected mice (n=8) were given a subcutaneous injection of a single 100 μg dose of a GalNAc-conjugated siRNA or PBS as vehicle control.

[0602] Mice were euthanized on Day 14 after subcutaneous injection and a liver sample from each was collected and placed in RNAlater (ThermoFisher Catalog #AM7020) until processing. Total liver RNA was prepared by homogenizing the liver tissue in homogenization buffer (Maxwell RSC simplyRNA Tissue Kit) using a Percellys 24 tissue homogenizer (Bertin Instruments) set at 5000 rpm for two 10 second cycles. Total RNA from the lysate was purified on a Maxwell RSC 48 platform (Promega Corporation) according to the manufacturer's recommendations. Preparation of cDNA was performed using Quanta qScript cDNA SuperMix (VWR, Catalog #95048-500) according to the manufacturer's instructions. The relative levels of liver MTRES1 mRNA were assessed by RT-qPCR in triplicate on a QuantStudio™ 6 Pro Real-Time PCR System using TaqMan assays for human MTRES1 (ThermoFisher, assay #Hs01568158_g1) and the mouse housekeeping gene PPIA (ThermoFisher, assay #Mm02342430_g1) and PerfeCTa® qPCR FastMix®, Low ROX™ (VWR, Catalog #101419-222). Data were normalized to the mean MTRES1 mRNA level in animals receiving PBS. Results are shown in Table 51.

TABLE 49
Example siRNA Sequences

| | Sense | | Anti- | |
|---|---|---|---|---|
| | | | sense | |
| | Strand | Sense Strand | Strand | Antisense |
| siRNA | SEQ ID | Sequence (5′-3′) | SEQ ID | Strand Sequence |
| Name | NO: | with GalNAc moiety | NO: | (5′-3′) |
| ETD02354 | 3091 | [ETL17]suggcuAfGfuGfuuaaau | 3179 | usGfscAfaUfuUfaAfcAfcUfa |
| | | ugcasusu | | GfcCfasusu |
| ETD02355 | 3092 | [ETL17]sggcuagUfgUfUfaaauu | 3180 | usAfsgCfaAfuUfuAfaCfaCfu |
| | | gcuasusu | | AfgCfcsusu |
| ETD02356 | 3093 | [ETL17]sgcuagUfgUfUfaaauug | 3181 | usAfsaGfcAfaUfuUfaAfcAfc |
| | | cuuasusu | | UfaGfcsusu |
| ETD02357 | 3094 | [ETL17]scggugUfUfUfUfaagaa | 3182 | usGfsgCfuUfuCfuUfaAfaAfc |
| | | agccasusu | | AfcCfgsusu |
| ETD02358 | 3095 | [ETL17]sguacUfUfCfCfUfggaa | 3183 | usAfsuCfgAfuUfcCfaGfgAfa |
| | | ucgauasusu | | GfuAfcsusu |
| ETD02359 | 3096 | [ETL17]scaaguuAfcGfuGfcacc | 3184 | usUfsuUfgGfuGfcAfcGfuAfa |
| | | aaaasusu | | CfuUfgsusu |
| ETD02360 | 3097 | [ETL17]saaguUfaCfgUfgCfacc | 3185 | usAfsuUfuGfgUfgCfaCfgUfa |
| | | aaauasusu | | AfcUfususu |

TABLE 50
Example siRNA BASE Sequences

| | | Sense Strand | | Antisense Strand |
|---|---|---|---|---|
| siRNA | SEQ ID | Base Sequence | SEQ ID | Base Sequence |
| Name | NO: | (5′ to 3′) | NO: | (5′ to 3′) |
| ETD02354 | 2786 | UGGCUAGUGUUAAAUUGCAUU | 2968 | UGCAAUUUAACACUAGCCAUU |
| ETD02355 | 2787 | GGCUAGUGUUAAAUUGCUAUU | 2969 | UAGCAAUUUAACACUAGCCUU |
| ETD02356 | 2788 | GCUAGUGUUAAAUUGCUUAUU | 2970 | UAAGCAAUUUAACACUAGCUU |
| ETD02357 | 2789 | CGGUGUUUUAAGAAAGCCAUU | 2971 | UGGCUUUCUUAAAACACCGUU |
| ETD02358 | 2790 | GUACUUCCUGGAAUCGAUAUU | 2972 | UAUCGAUUCCAGGAAGUACUU |
| ETD02359 | 2791 | CAAGUUACGUGCACCAAAAUU | 2973 | UUUUGGUGCACGUAACUUGUU |
| ETD02360 | 2792 | AAGUUACGUGCACCAAAUAUU | 2974 | UAUUUGGUGCACGUAACUUUU |
| | | | | Sense Strand Base |
| | | Sense Strand Base | | Sequence (5′ to |
| siRNA | SEQ ID | Sequence (5′ to 3′), | SEQ ID | 3′), without |
| Name | NO: | without 3′ overhangs | NO: | 3′ overhangs |
| ETD02354 | 2814 | UGGCUAGUGUUAAAUUGCA | 2996 | UGCAAUUUAACACUAGCCA |
| ETD02355 | 2815 | GGCUAGUGUUAAAUUGCUA | 2997 | UAGCAAUUUAACACUAGCC |
| ETD02356 | 2816 | GCUAGUGUUAAAUUGCUUA | 2998 | UAAGCAAUUUAACACUAGC |
| ETD02357 | 2817 | CGGUGUUUUAAGAAAGCCA | 2999 | UGGCUUUCUUAAAACACCG |
| ETD02358 | 2818 | GUACUUCCUGGAAUCGAUA | 3000 | UAUCGAUUCCAGGAAGUAC |
| ETD02359 | 2819 | CAAGUUACGUGCACCAAAA | 3001 | UUUUGGUGCACGUAACUUG |
| ETD02360 | 2820 | AAGUUACGUGCACCAAAUA | 3002 | UAUUUGGUGCACGUAACUU |

TABLE 51
Relative MTRES1 mRNA Levels in Livers of Mice

| | | | Dose | Mean MTRES1 mRNA (Normalized |
|---|---|---|---|---|
| Group | n | Treatment | (ug) | to Group 1, Day 14) |
| 2 | 8 | PBS | | 1.00 |
| 3 | 8 | ETD02354 | 100 | 0.48 |
| 4 | 8 | ETD02355 | 100 | 0.57 |
| 5 | 8 | ETD02356 | 100 | 0.36 |
| 6 | 8 | ETD02357 | 100 | 0.57 |
| 7 | 8 | ETD02358 | 100 | 0.35 |
| 8 | 8 | ETD02359 | 100 | 0.54 |
| 9 | 8 | ETD02360 | 100 | 0.37 |

### Example 30. Screening siRNAs ETD02361 and ETD02363-ETD02367 Targeting Human MTRES1 mRNA in Mice Transfected with AAV8-TBG-h-MTRES1

[0603] Additional siRNAs targeting human MTRES1 mRNA and cross-reactive with at least cynomolgus monkey MTRES1 mRNA were tested for activity in mice following transfection with an adeno-associated viral vector. The siRNAs are conjugated to the GalNAc ligand ETL17. The siRNA sequences are shown in Tables 52A and 52B, where “Nf” is a 2′-fluoro-modified nucleoside, “n” is a 2′-O-methyl modified nucleoside, and “s” is a phosphorothioate linkage.

[0604] Six- to eight-week-old female mice (C57Bl/6) were injected with 5 μL of a recombinant adeno-associated virus 8 (AAV8) vector (1.0×10E13 genome copies/mL) by the retroorbital route on Day-14. The recombinant AAV8 contained the open reading frame and the majority of the 3′UTR of the human MTRES1 sequence (NM_016487.5) under the control of the human thyroxine binding globulin promoter in an AAV2 backbone packaged in AAV8 capsid (AAV8-TBG-h-MTRES1). On Day 0, infected mice (n=8) were given a subcutaneous injection of a single 100 μg dose of a GalNAc-conjugated siRNA or PBS as vehicle control.

[0605] Mice were euthanized on Day 14 after subcutaneous injection and a liver sample from each was collected and placed in RNAlater (ThermoFisher Catalog #AM7020) until processing. Total liver RNA was prepared by homogenizing the liver tissue in homogenization buffer (Maxwell RSC simplyRNA Tissue Kit) using a Percellys 24 tissue homogenizer (Bertin Instruments) set at 5000 rpm for two 10 second cycles. Total RNA from the lysate was purified on a Maxwell RSC 48 platform (Promega Corporation) according to the manufacturer's recommendations. Preparation of cDNA was performed using Quanta qScript cDNA SuperMix (VWR, Catalog #95048-500) according to the manufacturer's instructions. The relative levels of liver MTRES1 mRNA were assessed by RT-qPCR in triplicate on a QuantStudio™ 6 Pro Real-Time PCR System using TaqMan assays for human MTRES1 (ThermoFisher, assay #Hs01568158_g1) and the mouse housekeeping gene PPIA (ThermoFisher, assay #Mm02342430_g1) and PerfeCTa® qPCR FastMix®, Low ROX™ (VWR, Catalog #101419-222). Data were normalized to the mean MTRES1 mRNA level in animals receiving PBS. Results are shown in Table 53.

TABLE 52A
Example siRNA Sequences

| | Sense | | Antisense | |
|---|---|---|---|---|
| | Strand | | Strand | |
| siRNA | SEQ ID | Sense Strand Sequence | SEQ ID | Antisense Strand |
| Name | NO: | (5′-3′) with GalNAc moiety | NO: | Sequence (5′-3′) |
| ETD02361 | 3098 | [ETL17]sguuaCfgUfgCfaCfcaa | 3186 | usUfsaAfuUfuGfgUfgCfaCfg |
| | | auuaasusu | | UfaAfcsusu |
| ETD02363 | 3100 | [ETL17]sgucuAfcAfAfAfAfuc | 3188 | usUfsuAfgUfaGfaUfuUfuGfu |
| | | uacuaaasusu | | AfgAfcsusu |
| ETD02364 | 3101 | [ETL17]sagucUfUfUfUfCfggu | 3189 | usCfsaUfcAfuAfcCfgAfaAfa |
| | | augaugasusu | | GfaCfususu |
| ETD02365 | 3102 | [ETL17]sggcuAfgAfuAfuuggg | 3190 | usUfsuCfuCfcCfaAfuAfuCfu |
| | | agaaasusu | | AfgCfcsusu |
| ETD02366 | 3103 | [ETL17]sagauAfuuGfGfGfAfg | 3191 | usUfsuGfuUfuCfuCfcCfaAfu |
| | | aaacaaasusu | | AfuCfususu |
| ETD02367 | 3104 | [ETL17]sgauacAfuuGfGfaucuu | 3192 | usGfsaGfaAfgAfuCfcAfaUfg |
| | | cucasusu | | UfaUfcsusu |

TABLE 52B
Example siRNA BASE Sequences

| siRNA | SEQ ID | Sense Strand Base Sequence | SEQ ID | Antisense Strand Base Sequence |
|---|---|---|---|---|
| Name | NO: | (5′ to 3′) | NO: | (5′ to 3′) |
| ETD02361 | 2793 | GUUACGUGCACCAAAUUAAUU | 2975 | UUAAUUUGGUGCACGUAACUU |
| ETD02363 | 2795 | GUCUACAAAAUCUACUAAAUU | 2977 | UUUAGUAGAUUUUGUAGACUU |
| ETD02364 | 2796 | AGUCUUUUCGGUAUGAUGAUU | 2978 | UCAUCAUACCGAAAAGACUUU |
| ETD02365 | 2797 | GGCUAGAUAUUGGGAGAAAUU | 2979 | UUUCUCCCAAUAUCUAGCCUU |
| ETD02366 | 2798 | AGAUAUUGGGAGAAACAAAUU | 2980 | UUUGUUUCUCCCAAUAUCUUU |
| ETD02367 | 2799 | GAUACAUUGGAUCUUCUCAUU | 2981 | UGAGAAGAUCCAAUGUAUCUU |
| siRNA | SEQ ID | Sense Strand Base Sequence (5′ | SEQ ID | Sense Strand Base Sequence (5′ |
| Name | NO: | to 3′), without 3′ overhangs | NO: | to 3′), without 3′ overhangs |
| ETD02361 | 2821 | GUUACGUGCACCAAAUUAA | 3003 | UUAAUUUGGUGCACGUAAC |
| ETD02363 | 2823 | GUCUACAAAAUCUACUAAA | 3005 | UUUAGUAGAUUUUGUAGAC |
| ETD02364 | 2824 | AGUCUUUUCGGUAUGAUGA | 3006 | UCAUCAUACCGAAAAGACU |
| ETD02365 | 2825 | GGCUAGAUAUUGGGAGAAA | 3007 | UUUCUCCCAAUAUCUAGCC |
| ETD02366 | 2826 | AGAUAUUGGGAGAAACAAA | 3008 | UUUGUUUCUCCCAAUAUCU |
| ETD02367 | 2827 | GAUACAUUGGAUCUUCUCA | 3009 | UGAGAAGAUCCAAUGUAUC |

TABLE 53
Relative MTRES1 mRNA Levels in Livers of Mice

| | | | Dose | Mean MTRES1 mRNA (Normalized |
|---|---|---|---|---|
| Group | n | Treatment | (ug) | to Group 1, Day 14) |
| 2 | 8 | PBS | | 1.00 |
| 3 | 8 | ETD02361 | 100 | 1.37 |
| 5 | 8 | ETD02363 | 100 | 1.20 |
| 6 | 8 | ETD02364 | 100 | 1.41 |
| 7 | 8 | ETD02365 | 100 | 0.39 |
| 8 | 8 | ETD02366 | 100 | 0.82 |
| 9 | 8 | ETD02367 | 100 | 0.95 |

### Example 31. Screening siRNAs ETD02368-ETD02374 Targeting Human MTRES1 mRNA in Mice Transfected with AAV8-TBG-h-MTRES1

[0606] Additional siRNAs targeting human MTRES1 mRNA and cross-reactive with at least cynomolgus monkey MTRES1 mRNA were tested for activity in mice following transfection with an adeno-associated viral vector. The siRNAs are conjugated to the GalNAc ligand ETL17. The siRNA sequences are shown in Tables 54A and 54B, where “Nf” is a 2′-fluoro-modified nucleoside, “n” is a 2′-O-methyl modified nucleoside, and “s” is a phosphorothioate linkage.

[0607] Six- to eight-week-old female mice (C57Bl/6) were injected with 5 μL of a recombinant adeno-associated virus 8 (AAV8) vector (1.6×10E13 genome copies/mL) by the retroorbital route on Day-14. The recombinant AAV8 contained the open reading frame and the majority of the 3′UTR of the human MTRES1 sequence (NM_016487.5) under the control of the human thyroxine binding globulin promoter in an AAV2 backbone packaged in AAV8 capsid (AAV8-TBG-h-MTRES1). On Day 0, infected mice (n=8) were given a subcutaneous injection of a single 100 μg dose of a GalNAc-conjugated siRNA or PBS as vehicle control.

[0608] Mice were euthanized on Day 14 after subcutaneous injection and a liver sample from each was collected and placed in RNAlater (ThermoFisher Catalog #AM7020) until processing. Total liver RNA was prepared by homogenizing the liver tissue in homogenization buffer (Maxwell RSC simplyRNA Tissue Kit) using a Percellys 24 tissue homogenizer (Bertin Instruments) set at 5000 rpm for two 10 second cycles. Total RNA from the lysate was purified on a Maxwell RSC 48 platform (Promega Corporation) according to the manufacturer's recommendations. Preparation of cDNA was performed using Quanta qScript cDNA SuperMix (VWR, Catalog #95048-500) according to the manufacturer's instructions. The relative levels of liver MTRES1 mRNA were assessed by RT-qPCR in triplicate on a QuantStudio™ 6 Pro Real-Time PCR System using TaqMan assays for human MTRES1 (ThermoFisher, assay #Hs01568158_g1) and the mouse housekeeping gene PPIA (ThermoFisher, assay #Mm02342430_g1) and PerfeCTa® qPCR FastMix®, Low ROX™ (VWR, Catalog #101419-222). Data were normalized to the mean MTRES1 mRNA level in animals receiving PBS. Results are shown in Table 55.

TABLE 54A
Example siRNA Sequences

| | Sense | | Antisense | |
|---|---|---|---|---|
| | Strand | | Strand | |
| siRNA | SEQ ID | Sense Strand Sequence (5′-3′) | SEQ ID | Antisense Strand |
| Name | NO: | with GalNAc moiety | NO: | Sequence (5′-3′) |
| ETD02368 | 3105 | [ETL17]sucuuCfuCfaUfUfggag | 3193 | usUfscCfuCfuCfcAfaUfgAfg |
| | | aggaasusu | | AfaGfasusu |
| ETD02369 | 3106 | [ETL17]scucauuGfGfAfGfAfg | 3194 | usUfsuUfaUfcCfuCfuCfcAfa |
| | | gauaaaasusu | | UfgAfgsusu |
| ETD02370 | 3107 | [ETL17]sggauAfaAfGfAfAfgc | 3195 | usGfsuUfcCfuGfcUfuCfuUfu |
| | | aggaacasusu | | AfuCfcsusu |
| ETD02371 | 3108 | [ETL17]sagagaCfagUfUfaugcg | 3196 | usAfsuCfcGfcAfuAfaCfuGfu |
| | | gauasusu | | CfuCfususu |
| ETD02372 | 3109 | [ETL17]sagacAfGfuuAfuGfcg | 3197 | usGfsaAfuCfcGfcAfuAfaCfu |
| | | gauucasusu | | GfuCfususu |
| ETD02373 | 3110 | [ETL17]scaguUfaUfgCfggauuc | 3198 | usAfsgAfgAfaUfcCfgCfaUfa |
| | | ucuasusu | | AfcUfgsusu |
| ETD02374 | 3111 | [ETL17]suuauGfcGfgAfuucucu | 3199 | usUfscAfaGfaGfaAfuCfcGfc |
| | | ugaasusu | | AfuAfasusu |

TABLE 54B
Example siRNA BASE Sequences

| siRNA | SEQ ID | Sense Strand Base Sequence | SEQ ID | Antisense Strand Base Sequence |
|---|---|---|---|---|
| Name | NO: | (5′ to 3′) | NO: | (5′ to 3′) |
| ETD02368 | 2800 | UCUUCUCAUUGGAGAGGAAUU | 2982 | UUCCUCUCCAAUGAGAAGAUU |
| ETD02369 | 2801 | CUCAUUGGAGAGGAUAAAAUU | 2983 | UUUUAUCCUCUCCAAUGAGUU |
| ETD02370 | 2802 | GGAUAAAGAAGCAGGAACAUU | 2984 | UGUUCCUGCUUCUUUAUCCUU |
| ETD02371 | 2803 | AGAGACAGUUAUGCGGAUAUU | 2985 | UAUCCGCAUAACUGUCUCUUU |
| ETD02372 | 2804 | AGACAGUUAUGCGGAUUCAUU | 2986 | UGAAUCCGCAUAACUGUCUUU |
| ETD02373 | 2805 | CAGUUAUGCGGAUUCUCUAUU | 2987 | UAGAGAAUCCGCAUAACUGUU |
| ETD02374 | 2806 | UUAUGCGGAUUCUCUUGAAUU | 2988 | UUCAAGAGAAUCCGCAUAAUU |
| siRNA | SEQ ID | Sense Strand Base Sequence (5′ | SEQ ID | Sense Strand Base Sequence (5′ |
| Name | NO: | to 3′), without 3′ overhangs | NO: | to 3′), without 3′ overhangs |
| ETD02368 | 2828 | UCUUCUCAUUGGAGAGGAA | 3010 | UUCCUCUCCAAUGAGAAGA |
| ETD02369 | 2829 | CUCAUUGGAGAGGAUAAAA | 3011 | UUUUAUCCUCUCCAAUGAG |
| ETD02370 | 2830 | GGAUAAAGAAGCAGGAACA | 3012 | UGUUCCUGCUUCUUUAUCC |
| ETD02371 | 2831 | AGAGACAGUUAUGCGGAUA | 3013 | UAUCCGCAUAACUGUCUCU |
| ETD02372 | 2832 | AGACAGUUAUGCGGAUUCA | 3014 | UGAAUCCGCAUAACUGUCU |
| ETD02373 | 2833 | CAGUUAUGCGGAUUCUCUA | 3015 | UAGAGAAUCCGCAUAACUG |
| ETD02374 | 2834 | UUAUGCGGAUUCUCUUGAA | 3016 | UUCAAGAGAAUCCGCAUAA |

TABLE 55
Relative MTRES1 mRNA Levels in Livers of Mice

| | | | Dose | Mean MTRES1 mRNA (Normalized |
|---|---|---|---|---|
| Group | n | Treatment | (ug) | to PBS Group, Day 14) |
| 2 | 8 | PBS | | 1.00 |
| 3 | 8 | ETD02368 | 100 | 1.84 |
| 4 | 8 | ETD02369 | 100 | 0.79 |
| 5 | 8 | ETD02370 | 100 | 0.97 |
| 6 | 8 | ETD02371 | 100 | 2.03 |
| 7 | 8 | ETD02372 | 100 | 1.09 |
| 8 | 8 | ETD02373 | 100 | 0.51 |
| 9 | 8 | ETD02374 | 100 | 0.80 |

### Example 32. Determining the Activity of siRNAs ETD02077, ETD02182 and ETD02177 and siRNAs of the Same Base Sequences with Alternative Modifications Targeting Human MTRES1 mRNA in Mice Transfected with AAV8-TBG-h-MTRES1

[0609] ETD02077, ETD02182 and ETD02177 and siRNAs of the same base sequences containing alternative modifications were tested for activity in mice following transfection with an adeno-associated viral vector expressing human MTRES1. The siRNAs are conjugated to the GalNAc ligand ETL17. The siRNA sequences are shown in Tables 56 and 57, where “Nf” is a 2′-fluoro-modified nucleoside, “n” is a 2′-O-methyl modified nucleoside, and “s” is a phosphorothioate linkage.

[0610] Six- to eight-week-old female mice (C57Bl/6) were injected with 5 μL of a recombinant adeno-associated virus 8 (AAV8) vector (1.6×10E13 genome copies/mL) by the retroorbital route on Day-14. The recombinant AAV8 contained the open reading frame and the majority of the 3′UTR of the human MTRES1 sequence (NM_016487.5) under the control of the human thyroxine binding globulin promoter in an AAV2 backbone packaged in AAV8 capsid (AAV8-TBG-h-MTRES1). On Day 0, infected mice (n=8) were given a subcutaneous injection of a single 60 μg or 100 μg dose of a GalNAc-conjugated siRNA or PBS as vehicle control.

[0611] Mice were euthanized on Day 11 after subcutaneous injection and a liver sample from each was collected and placed in RNAlater (ThermoFisher Catalog #AM7020) until processing. Total liver RNA was prepared by homogenizing the liver tissue in homogenization buffer (Maxwell RSC simplyRNA Tissue Kit) using a Percellys 24 tissue homogenizer (Bertin Instruments) set at 5000 rpm for two 10 second cycles. Total RNA from the lysate was purified on a Maxwell RSC 48 platform (Promega Corporation) according to the manufacturer's recommendations. Preparation of cDNA was performed using Quanta qScript cDNA SuperMix (VWR, Catalog #95048-500) according to the manufacturer's instructions. The relative levels of liver MTRES1 mRNA were assessed by RT-qPCR in triplicate on a QuantStudio™ 6 Pro Real-Time PCR System using TaqMan assays for human MTRES1 (ThermoFisher, assay #Hs01568158_g1) and the mouse housekeeping gene PPIA (ThermoFisher, assay #Mm02342430_g1) and PerfeCTa® qPCR FastMix®, Low ROX™ (VWR, Catalog #101419-222). Data were normalized to the mean MTRES1 mRNA level in animals receiving PBS. Results are shown in Table 58.

TABLE 56
Example siRNA Sequences

| | Sense | | Antisense | |
|---|---|---|---|---|
| | Strand | | Strand | |
| siRNA | SEQ ID | Sense Strand Sequence | SEQ ID | Antisense Strand Sequence |
| Name | NO: | (5′-3′) with GalNAc moiety | NO: | (5′-3′) |
| ETD02077 | 3084 | [ETL17]sgaagAfAfAfAfGfcag | 3171 | usAfscCfgUfuCfuGfcUfuUfu |
| | | aacgguasusu | | CfuUfcsusu |
| ETD02192 | 3259 | [ETL17]sgaagAfAfAfAfGfcag | 3261 | usAfsccGfuUfcuGfcUfuUfuCf |
| | | aacgguasusu | | uUfcsusu |
| ETD02182 | 3088 | [ETL17]sucuacAfAfAfGfGfug | 3176 | usUfsgagUfuCfaCfcUfuUfgUf |
| | | aacucaasusu | | aGfasusu |
| ETD02185 | 3090 | [ETL17]sucuacAfAfAfGfGfug | 3178 | usUfsgAfguUfcAfccuuUfgUfa |
| | | aacucaasusu | | Gfasusu |
| ETD02177 | 3074 | [ETL17]saagaAfaAfGfCfagaac | 3161 | usCfsaCfcGfuUfcUfgCfuUfu |
| | | ggugasusu | | UfcUfususu |
| ETD02406 | 3260 | [ETL17]saagaaAfAfGfCfagaac | 3262 | usCfsaCfcGfuUfcUfgCfuUfu |
| | | ggugasusu | | UfcUfususu |

TABLE 57
Example siRNA BASE Sequences

| | SEQ | | SEQ | |
|---|---|---|---|---|
| siRNA | ID | Sense Strand Base | ID | Antisense Strand Base |
| Name | NO: | Sequence (5′ to 3′) | NO: | Sequence (5′ to 3′) |
| ETD02077 | 2771 | GAAGAAAAGCAGAACGGUAUU | 2953 | UACCGUUCUGCUUUUCUUCUU |
| ETD02192 | 2773 | GAAGAAAAGCAGAACGGUAUU | 2955 | UACCGUUCUGCUUUUCUUCUU |
| ETD02182 | 2775 | UCUACAAAGGUGAACUCAAUU | 2957 | UUGAGUUCACCUUUGUAGAUU |
| ETD02185 | 2777 | UCUACAAAGGUGAACUCAAUU | 2959 | UUGAGUUCACCUUUGUAGAUU |
| ETD02177 | 2744 | AAGAAAAGCAGAACGGUGAUU | 2926 | UCACCGUUCUGCUUUUCUUUU |
| ETD02406 | 3263 | AAGAAAAGCAGAACGGUGAUU | 3265 | UCACCGUUCUGCUUUUCUUUU |
| | SEQ | Sense Strand Base | SEQ | Sense Strand Base |
| siRNA | ID | Sequence (5′ to 3′), | ID | Sequence (5′ to 3′), |
| Name | NO: | without 3′ overhangs | NO: | without 3′ overhangs |
| ETD02077 | 2779 | GAAGAAAAGCAGAACGGUA | 2961 | UACCGUUCUGCUUUUCUUC |
| ETD02192 | 2781 | GAAGAAAAGCAGAACGGUA | 2963 | UACCGUUCUGCUUUUCUUC |
| ETD02182 | 2783 | UCUACAAAGGUGAACUCAA | 2965 | UUGAGUUCACCUUUGUAGA |
| ETD02185 | 2785 | UCUACAAAGGUGAACUCAA | 2967 | UUGAGUUCACCUUUGUAGA |
| ETD02177 | 2753 | AAGAAAAGCAGAACGGUGA | 2935 | UCACCGUUCUGCUUUUCUU |
| ETD02406 | 3264 | AAGAAAAGCAGAACGGUGA | 3266 | UCACCGUUCUGCUUUUCUU |

TABLE 58
Relative MTRES1 mRNA Levels in Livers of Mice

| | | | Dose | Mean MTRES1 mRNA (Normalized |
|---|---|---|---|---|
| Group | n | Treatment | (ug) | to PBS Group, Day 11) |
| 2 | 8 | PBS | | 1.00 |
| 3 | 8 | ETD02077 | 60 | 1.63 |
| 4 | 8 | ETD02192 | 60 | 0.84 |
| 5 | 8 | ETD02182 | 60 | 0.72 |
| 6 | 8 | ETD02185 | 60 | 0.61 |
| 7 | 8 | ETD02177 | 100 | 0.32 |
| 8 | 8 | ETD02406 | 100 | 0.55 |

### Example 33. Screening MTRES1 siRNAs with Alternative Modification Patterns in Mice

[0612] The base sequence of ETD02177 was synthesized with alternative modification patterns and then tested for activity in mice. The siRNA sequences are shown in Table 59 and 60, where Nf is a 2′-fluoro-modified nucleoside, “n” is a 2′-O-methyl modified nucleoside, “nm” is a 2′-O-methoxyethyl modified nucleoside, and “s” is a phosphorothioate linkage. All siRNAs were conjugated to the GalNAc ligand ETL17.

[0613] Six- to eight-week-old female mice (strain ICR, n=3) were given a subcutaneous injection on Day 0 of a single 100 μg dose of a GalNAc-conjugated siRNA or PBS as vehicle control.

[0614] Mice were euthanized on Day 14 after injection and a liver sample from each was collected and placed in RNAlater (ThermoFisher Catalog #AM7020) until processing. Total liver RNA was prepared by homogenizing the liver tissue in homogenization buffer (Maxwell RSC simplyRNA Tissue Kit) using a Percellys 24 tissue homogenizer (Bertin Instruments) set at 5000 rpm for two 10 second cycles. Total RNA from the lysate was purified on a Maxwell RSC 48 platform (Promega Corporation) according to the manufacturer's recommendations. Preparation of cDNA was performed using Quanta qScript cDNA SuperMix (VWR, Catalog #95048-500) according to the manufacturer's instructions. The relative levels of liver MTRES1 mRNA were assessed by RT-qPCR in triplicate on a QuantStudio™ 6 Pro Real-Time PCR System using TaqMan assays for mouse MTRES1 (ThermoFisher, assay #Mm01229834_m1) and the mouse housekeeping gene PPIA (ThermoFisher, assay #Mm02342430_g1) and PerfeCTaR qPCR FastMix®, Low ROX™ (VWR, Catalog #101419-222). Data were normalized to the mean MTRES1 mRNA level in animals receiving PBS. Results are shown in Table 61. ETD02177 and all of the alternatively modified versions of ETD02177 gave a reduction in mouse MTRES1 liver mRNA after administration. Mice receiving ETD02409 had the highest level of mean MTRES1 mRNA knockdown in the liver.

TABLE 59
Example siRNA Sequences

| | Sense | | Antisense | |
|---|---|---|---|---|
| | Strand | | Strand | |
| siRNA | SEQ ID | Sense Strand Sequence | SEQ ID | Antisense Strand Sequence |
| Name | NO: | (5′-3′) with GalNAc moiety | NO: | (5′-3′) |
| ETD02177 | 3074 | [ETL17]saagaAfaAfGfCfagaac | 3161 | usCfsaCfcGfuUfcUfgCfuUfu |
| | | ggugasusu | | UfcUfususu |
| ETD02406 | 3267 | [ETL17]saagaaAfAfGfCfagaac | 3274 | usCfsaCfcGfuUfcUfgCfuUfu |
| | | ggugasusu | | UfcUfususu |
| ETD02407 | 3268 | [ETL17]saagamaAfAfGfCfaga | 3275 | usCfsaCfcGfuUfcUfgCfuUfu |
| | | acgmgugasusu | | UfcUfususu |
| ETD02408 | 3269 | [ETL17]saagamaAfAfGfCfaga | 3276 | usCfsaCfcGfuUfcUfgCfuUfu |
| | | acmggugasusu | | UfcUfususu |
| ETD02409 | 3270 | [ETL17]saagamaAfAfGfCfaga | 3277 | usCfsaCfcGfuUfcUfgCfuUfu |
| | | amcggugasusu | | UfcUfususu |
| ETD02410 | 3271 | [ETL17]saagamaAfAfGfCfaga | 3278 | usCfsaCfcGfuUfcUfgCfuUfu |
| | | macggugasusu | | UfcUfususu |
| ETD02411 | 3272 | [ETL17]saagaamAfAfGfCfaga | 3279 | usCfsaCfcGfuUfcUfgCfuUfu |
| | | macggugasusu | | UfcUfususu |
| ETD02412 | 3273 | [ETL17]saagaamAfAfGfCfaga | 3280 | usCfsaCfcGfuUfcUfgCfuUfu |
| | | amcggugasusu | | UfcUfususu |

TABLE 60
Example siRNA BASE Sequences

| | SEQ | Sense Strand Base | SEQ | Antisense Strand Base |
|---|---|---|---|---|
| siRNA | ID | Sequence (5′ to 3′), | ID | Sequence (5′ to 3′), |
| Name | NO: | without 3′ overhangs | NO: | without 3′ overhangs |
| ETD02177 | 3074 | AAGAAAAGCAGAACGGUGA | 3161 | UCACCGUUCUGCUUUUCUU |
| ETD02406 | 3281 | AAGAAAAGCAGAACGGUGA | 3288 | UCACCGUUCUGCUUUUCUU |
| ETD02407 | 3282 | AAGAAAAGCAGAACGGUGA | 3289 | UCACCGUUCUGCUUUUCUU |
| ETD02408 | 3283 | AAGAAAAGCAGAACGGUGA | 3290 | UCACCGUUCUGCUUUUCUU |
| ETD02409 | 3284 | AAGAAAAGCAGAACGGUGA | 3291 | UCACCGUUCUGCUUUUCUU |
| ETD02410 | 3285 | AAGAAAAGCAGAACGGUGA | 3293 | UCACCGUUCUGCUUUUCUU |
| ETD02411 | 3286 | AAGAAAAGCAGAACGGUGA | 3294 | UCACCGUUCUGCUUUUCUU |
| ETD02412 | 3287 | AAGAAAAGCAGAACGGUGA | 3295 | UCACCGUUCUGCUUUUCUU |

TABLE 61
Relative MTRES1 mRNA Levels in Livers of Mice

| | | | Dose | Mean MTRES1 mRNA (Normalized |
|---|---|---|---|---|
| Group | n | Treatment | (ug) | to Group 1, Day 14) |
| 1 | 3 | PBS | | 1.00 |
| 2 | 3 | ETD02177 | 100 | 0.52 |
| 3 | 3 | ETD02406 | 100 | 0.35 |
| 4 | 3 | ETD02407 | 100 | 0.27 |
| 5 | 3 | ETD02408 | 100 | 0.30 |
| 6 | 3 | ETD02409 | 100 | 0.11 |
| 7 | 3 | ETD02410 | 100 | 0.29 |
| 8 | 3 | ETD02411 | 100 | 0.22 |
| 9 | 3 | ETD02412 | 100 | 0.30 |

### Example 34: Intracerebroventricular Injections

[0615] The siRNA sequences are shown in Tables 62A-62B, where Nf is a 2′-fluoro-modified nucleoside, “n” is a 2′-O-methyl modified nucleoside, “nm” is a 2′-O-methoxyethyl modified nucleoside, and “s” is a phosphorothioate linkage. 5VP is vinyl phosphonate at 5′ end of antisense strand using 5′-POM-vinyl phosphonate, 2′-OMe-U CE-Phosphoramidite (Biosearch Technologies, 2579).

[0616] Mice were induced to anesthetic states in an induction chamber with 1.2% isoflurane vaporized by oxygen of 1.0 L/min and then transferred and fixed to a stereotaxic frame while keeping anesthetized by 0.8% isoflurane through a mask. Skull was exposed and single intracerebroventricular injections (5 μL, artificial cerebrospinal fluid as vehicle) were performed at 500 nL min⁻¹ after needle placement at the following coordinates from bregma: −0.2 mm anterior-posterior, 0.8 mm mediolateral and −2.5 mm dorsoventral using a Standard U-Frame Stereotaxic Instrument for Mouse (Harvard Apparatus 75-1808) and a Stereotaxic Anesthesia Adapters with Anesthesia Masks (Harvard Apparatus 75-1856).

TABLE 62A
siRNA duplexes

| | SEQ | | SEQ | |
|---|---|---|---|---|
| | ID | | ID | Antisense |
| Entity # | NO | Sense Strand | NO | Strand |
| ETD02550 | 3296 | [ETL20]aagam | 3300 | 5VPusCfsaC |
| | | aAfAfGfCfaga | | fcGfuUfcUf |
| | | amcggugasusu | | gCfuUfuUfc |
| | | | | Ufususu |

TABLE 62B
siRNA duplexes base sequences

| | SEQ | | SEQ | |
|---|---|---|---|---|
| | ID | | ID | Antisense |
| Entity # | NO | Sense Strand | NO | Strand |
| ETD02550 | 2698 | AAGAAAAGCAGA | 2880 | UCACCGUUCU |
| | | ACGGUGA | | GCUUUUCUU |

[0617] Mice were euthanized on day 14 post-injection. Brains from each animal were harvested and dissected into right and left hemispheres.

[0618] Total RNA was extracted from homogenized tissue and reverse transcribed to cDNA using a First-Strand III cDNA Synthesis kit. Normalized cDNA quantification was carried out by real-time TaqMan PCR using fluorescently labeled TaqMan assays for mouse MTRES1 (ThermoFisher, assay #Mm01229834_m1) and the mouse housekeeping gene PPIA (ThermoFisher, assay #Mm02342430_g1). Reactions were carried out in 20 μL aliquots using TaqMan Universal PCR Master Mix No AmpErase UNG ran on an ABI Prism 7500 Fast Real-Time PCR System Sequence Detection System and analyzed by the 7500 System software. Relative Quantification (RQ) values between treated and untreated samples are calculated by the formula 2-ΔΔCT, where CT is the cycle at threshold (automatic measurement), ΔCT is CT of the assayed gene (MTRES1) minus CT of the endogenous control (PPIA), and ΔΔCT is the ΔCT of the normalized assayed gene in the treated sample minus the ΔCT of the same gene in the untreated one (calibrator). Results are depicted in Table 63.

TABLE 63
Relative MTRES1 mRNA Levels in Brains of Mice

| | |
|---|---|
| siRNA | Average mRNA relative to no treatment control animals |

50 μg dose

| | |
|---|---|
| ETD02550 | 0.18 |

### Example 35: Intracerebroventricular Injections

[0619] The siRNA sequences are shown in Tables 64A-64B, where Nf is a 2′-fluoro-modified nucleoside, “n” is a 2′-O-methyl modified nucleoside, “nm” is a 2′-O-methoxyethyl modified nucleoside, and “s” is a phosphorothioate linkage. 5VP is vinyl phosphonate at 5′ end of antisense strand using 5′-POM-vinyl phosphonate, 2′-OMe-U CE-Phosphoramidite (Biosearch Technologies, 2579).

[0620] Mice were induced to anesthetic states in an induction chamber with 1.2% isoflurane vaporized by oxygen of 1.0 L/min and then transferred and fixed to a stereotaxic frame while keeping anesthetized by 0.8% isoflurane through a mask. Skull was exposed and single intracerebroventricular injections (5 μl, artificial cerebrospinal fluid as vehicle) were performed at 500 nl min⁻¹ after needle placement at the following coordinates from bregma: −0.2 mm anterior-posterior, 0.8 mm mediolateral and −2.5 mm dorsoventral using a Standard U-Frame Stereotaxic Instrument for Mouse (Harvard Apparatus 75-1808) and a Stereotaxic Anesthesia Adapters with Anesthesia Masks (Harvard Apparatus 75-1856). 6 mice were tested in each group.

TABLE 64A
siRNA duplexes

| | | SEQ | | SEQ | |
|---|---|---|---|---|---|
| | posi- | ID | Sense | ID | Antisense |
| Entity # | tion | NO | Strand | NO | Strand |
| ETD02209 | 574 | 3297 | [ELT20]cuA | 3301 | usCfsugaG |
| | | | fcAfaAfgGf | | fuUfcaccu |
| | | | uGfaAfcucA | | UfuGfuags |
| | | | fgAfsusu | | usu |
| ETD02137 | 574 | 3298 | [ELT20]cuA | 3302 | 5VPusCfsu |
| | | | fcAfaAfgGf | | gaGfuUfca |
| | | | uGfaAfcucA | | ccuUfuGfu |
| | | | fgAfsusu | | agsusu |

TABLE 64B
siRNA duplexes base sequences

| | SEQ | | SEQ | |
|---|---|---|---|---|
| | ID | | ID | |
| Entity # | NO | Sense Strand | NO | Antisense Strand |
| ETD02209 | 2555 | CUACAAAGGUGA | 2617 | UCUGAGUUCACCUUUG |
| | | ACUCAGA | | UAG |
| ETD02137 | 2555 | CUACAAAGGUGA | 2617 | UCUGAGUUCACCUUUG |
| | | ACUCAGA | | UAG |

[0621] Mice were euthanized on 14, 28 days, 3 or 6 months post-injection. Brains from each animal were harvested and dissected into right and left hemispheres.

[0622] Total RNA was extracted from homogenized tissue and reverse transcribed to cDNA using a First-Strand III cDNA Synthesis kit. Normalized cDNA quantification was carried out by real-time TaqMan PCR using fluorescently labeled TaqMan assays for mouse MTRES1 (ThermoFisher, assay #Mm01229834_m1) and the mouse housekeeping gene PPIA (ThermoFisher, assay #Mm02342430_g1). Reactions were carried out in 20 μL aliquots using TaqMan Universal PCR Master Mix No AmpErase UNG ran on an ABI Prism 7500 Fast Real-Time PCR System Sequence Detection System and analyzed by the 7500 System software. Relative Quantification (RQ) values between treated and untreated samples are calculated by the formula 2-ΔΔCT, where CT is the cycle at threshold (automatic measurement), ΔCT is CT of the assayed gene (MTRES1) minus CT of the endogenous control (PPIA), and ΔΔCT is the ΔCT of the normalized assayed gene in the treated sample minus the ΔCT of the same gene in the untreated one (calibrator). Results are depicted in Table 65.

TABLE 65
Relative MTRES1 mRNA Levels in Brains of Mice

| | No | | | | | |
|---|---|---|---|---|---|---|
| | Treatment | SD | 100 ug 2209 | SD | 100 ug 2137 | SD |
| 14 days | 1.00 | 0.10 | 0.22 | 0.32 | 0.02 | 0.00 |
| 28 days | 1.00 | 0.11 | 0.02 | 0.01 | 0.02 | 0.01 |
| 3 Month | 1.00 | 0.04 | 0.38 | 0.37 | 0.05 | 0.04 |
| 6 Month | 1.00 | 0.04 | 0.79 | 0.13 | 0.12 | 0.09 |

### Example 36: Rat Intrathecal Study

[0623] Duplexes formulated at 30 mg ml⁻¹ in 0.9% NaCl in water were administered as 30-μl IT injections by lumbar puncture in the dorsal region of the spine between the L5 and L6 vertebral space to male Sprague Dawley rats (N=5 or 6) 250-300 g. After anesthesia with isoflurane, rats were placed on a warm heating pad; the IT injection site was shaved and disinfected. The rats were put in a prone position, and held at the height of the iliac crest, hind legs pointing out- and downward. The injection site was identified by palpation and marked on the skin. After identification of the puncture site, an insulin syringe was inserted between the L5 and L6 spinous processes. Once in contact with the spinal column bone, the syringe angle was reduced to approximately 30° and carefully pushed forward into the intervertebral space. Piercing of the dura mater caused a reflexive tail or limb flick, which is used as an indication of the needle being in the correct location. Once the indication of dura puncture was observed, the test article was delivered as a bolus dose (within ~2 s) in a volume of 30 μL. The needle was then be kept in place for an additional 5 s before withdrawal of the needle with a slow rotating movement. The animals were then allowed to recover.

[0624] Rats were euthanized on Day 14 after injection and samples of liver, kidney, R/L frontal cortex, R/L temporal cortex, hippocampus, brain stem, cerebellum and the spinal cord from each were collected and placed in RNAlater (ThermoFisher Catalog #AM7020) until processing. Total liver RNA was prepared by homogenizing the liver tissue in homogenization buffer (Maxwell RSC simplyRNA Tissue Kit) using a Percellys 24 tissue homogenizer (Bertin Instruments) set at 5000 rpm for two 10 second cycles. Total RNA from the lysate was purified on a Maxwell RSC 48 platform (Promega Corporation) according to the manufacturer's recommendations. Preparation of cDNA was performed using Quanta qScript cDNA SuperMix (VWR, Catalog #95048-500) according to the manufacturer's instructions. The relative levels of MTRES1 mRNA were assessed by RT-qPCR in triplicate on a QuantStudio™ 6 Pro Real-Time PCR System using TaqMan assays for rat MTRES1 (ThermoFisher, assay #Rn01441122_m1) and the rat housekeeping gene PPIA (ThermoFisher, assay #Rn03302269_gH) and PerfeCTaR qPCR FastMix®, Low ROX™ (VWR, Catalog #101419-222). Data were normalized to the mean MTRES1 mRNA level in animals receiving vehicle (saline) control. Results are shown in Table 66. The siRNA sequences are shown in Tables 67A-67B, where Nf is a 2′-fluoro-modified nucleoside, “n” is a 2′-O-methyl modified nucleoside, “nm” is a 2′-O-methoxyethyl modified nucleoside, and “s” is a phosphorothioate linkage

TABLE 66
Relative MTRES1 mRNA Levels in Brains of Mice.

| | vehicle control | | | ETD02210 | | | ETD02211 | | | ETD02275 | | |
|---|---|---|---|---|---|---|---|---|---|---|---|---|
| | relative | | | relative | | | relative | | | relative | | |
| tissue | mRNA | SD | n | mRNA | SD | n | mRNA | SD | n | mRNA | SD | n |
| Spinal Cord | 1.02 | 0.21 | 6 | 0.02 | 0.02 | 6 | 0.15 | 0.22 | 6 | 0.11 | 0.04 | 6 |
| Cerebellum | 1.00 | 0.06 | 6 | 0.03 | 0.03 | 6 | 0.22 | 0.19 | 6 | 0.18 | 0.04 | 6 |
| Hippocampus | 1.01 | 0.18 | 5 | 0.03 | 0.02 | 6 | 0.28 | 0.27 | 5 | 0.24 | 0.11 | 6 |
| Brain Stem | 1.05 | 0.29 | 6 | 0.02 | 0.01 | 6 | 0.23 | 0.19 | 6 | 0.23 | 0.05 | 6 |
| Frontal | 1.01 | 0.16 | 5 | 0.04 | 0.02 | 6 | 0.33 | 0.21 | 6 | 0.25 | 0.09 | 6 |
| Cortex Left | | | | | | | | | | | | |
| Frontal | 1.03 | 0.25 | 6 | 0.03 | 0.02 | 6 | 0.34 | 0.30 | 6 | 0.24 | 0.09 | 6 |
| Cortex Right | | | | | | | | | | | | |
| Temporal | 1.01 | 0.14 | 6 | 0.03 | 0.01 | 6 | 0.28 | 0.32 | 6 | 0.22 | 0.04 | 6 |
| Cortex Left | | | | | | | | | | | | |
| Temporal | 1.02 | 0.19 | 6 | 0.02 | 0.01 | 6 | 0.36 | 0.35 | 6 | 0.20 | 0.07 | 6 |
| Cortex Right | | | | | | | | | | | | |
| | vehicle control | | | ETD02274 | | | ETD02804 | | | ETD02789 | | |
| | relative | | | relative | | | relative | | | relative | | |
| tissue | mRNA | SD | n | mRNA | SD | n | mRNA | SD | n | mRNA | SD | n |
| Kidney | 1.04 | 0.32 | 6 | 0.25 | 0.08 | 6 | 0.60 | 0.11 | 6 | 0.86 | 0.21 | 6 |
| Liver | 1.03 | 0.25 | 6 | 0.27 | 0.05 | 6 | 0.61 | 0.16 | 6 | 0.77 | 0.12 | 6 |
| Lumbar | 1.02 | 0.22 | 6 | 0.19 | 0.35 | 6 | 0.32 | 0.36 | 6 | 1.14 | 0.21 | 6 |
| Spinal Cord | | | | | | | | | | | | |
| Thoracic | 1.02 | 0.23 | 6 | 0.31 | 0.45 | 6 | 0.37 | 0.37 | 6 | 1.04 | 0.07 | 6 |
| Spinal Cord | | | | | | | | | | | | |
| Cervical | 1.02 | 0.20 | 6 | 0.32 | 0.36 | 6 | 0.53 | 0.41 | 6 | 1.04 | 0.12 | 6 |
| Spinal Cord | | | | | | | | | | | | |
| Cerebellum | 1.03 | 0.24 | 6 | 0.31 | 0.55 | 6 | 0.80 | 0.28 | 6 | 1.13 | 0.11 | 6 |
| Brain Stem | 1.06 | 0.34 | 6 | 0.30 | 0.25 | 6 | 0.62 | 0.30 | 6 | 1.01 | 0.25 | 6 |
| Hippocampus | 1.00 | 0.07 | 6 | 0.55 | 0.49 | 6 | 0.75 | 0.30 | 6 | 0.95 | 0.06 | 6 |
| Liver | 1.03 | 0.25 | 6 | 0.27 | 0.05 | 6 | 0.61 | 0.16 | 6 | 0.77 | 0.12 | 6 |
| Temporal | 1.03 | 0.31 | 6 | 0.60 | 0.47 | 6 | 0.79 | 0.19 | 6 | 0.93 | 0.22 | 6 |
| Cortex Left | | | | | | | | | | | | |
| Temporal | 1.07 | 0.43 | 6 | 0.49 | 0.46 | 6 | 0.66 | 0.17 | 6 | 1.06 | 0.35 | 6 |
| Cortex Right | | | | | | | | | | | | |
| Frontal | 1.04 | 0.26 | 6 | 0.49 | 0.55 | 6 | 1.04 | 0.50 | 6 | 0.86 | 0.14 | 6 |
| Cortex Left | | | | | | | | | | | | |
| Frontal | 1.20 | 0.82 | 6 | 0.46 | 0.56 | 6 | 0.73 | 0.16 | 6 | 0.87 | 0.23 | 6 |
| Cortex Right | | | | | | | | | | | | |

TABLE 67A
siRNA sequences

| | SEQ | | SEQ | |
|---|---|---|---|---|
| | ID | Duplexes | ID | Duplexes |
| Entity # | NO | Sense Strand AXO Format | NO | Antisense Strand AXO Format |
| ETD02210 | 3241 | [ETL20]ucuacAfAfAfGfGfugaacucaasusu | 3244 | 5VPusUfsgAfgUfuCfaCfcUfuUfgUfaGfasusu |
| ETD02211 | 3242 | [ETL20]gaagAfAfAfAfGfcagaacgguasusu | 3245 | 5VPusAfscCfgUfuCfuGfcUfuUfuCfuUfcsusu |
| ETD02274 | 3241 | [ETL20]ucuacAfAfAfGfGfugaacucaasusu | 3247 | 5VPusUfsgaGfuUfcaCfcUfuUfgUfaGfasusu |
| ETD02275 | 3242 | [ETL20]gaagAfAfAfAfGfcagaacgguasusu | 3248 | 5VPusAfsccgUfuCfuGfcUfuUfuCfuUfcsusu |
| ETD02804 | 3299 | [ETL20]suscuacAfAfAfGfGfugaacucaasusu | 3304 | 5VPusUfsgaGfuUfcaCfcUfuUfgUfaGfasusu |

TABLE 67B
siRNA base sequences

| | | | | Duplexes |
|---|---|---|---|---|
| | SEQ | Duplexes | SEQ | Antisense |
| | ID | Sense Strand | ID | Strand |
| Entity # | NO | AXO Format | NO | AXO Format |
| ETD02210 | 2721 | UCUACAAAGGUG | 2903 | UUGAGUUCAC |
| | | AACUCAA | | CUUUGUAGA |
| ETD02211 | 2729 | GAAGAAAAGCAG | 2911 | UACCGUUCUG |
| | | AACGGUA | | CUUUUCUUC |
| ETD02274 | 2721 | UCUACAAAGGUG | 2903 | UUGAGUUCAC |
| | | AACUCAA | | CUUUGUAGA |
| ETD02275 | 2729 | GAAGAAAAGCAG | 2911 | UACCGUUCUG |
| | | AACGGUA | | CUUUUCUUC |
| ETD02804 | 2720 | UCUACAAAGGUG | 2902 | UUGAGUUCAC |
| | | AACUCAA | | CUUUGUAGA |

### Example 37: Modification Motif 3

[0625] An example siRNA includes a combination of the following modifications:
[0626] All positions of the sense strand are 2′F, 2′-O-methoxyethyl, or 2′-O-methyl
[0627] All antisense strands are 2′F or 2′-O-methyl

### Example 38: Modification Motif 4

[0628] An example siRNA includes a combination of the following modifications:
[0629] Positions 6-9 of the sense strand is 2′F.
[0630] Positions 4 or 5 of the sense strand is 2′-O-methoxyethyl
[0631] Positions 16-20 of the sense strand are 2′-O-methyl.
[0632] All remaining positions of the sense strand are 2′F, 2′-O-methoxyethyl, or 2′-O-methyl
[0633] All antisense strands are 2′F or 2′-O-methyl

### Example 39: Screening MTRES1 siRNAs with Alternative Modification Patterns in Mice

[0634] The base sequences of ETD02406 were synthesized with alternative modification patterns and then tested for activity in mice. The siRNAs were attached to the GalNAc ligand ETL17. The siRNA sequences are shown in Table 68, where Nf is a 2′-fluoro-modified nucleoside, n is a 2′-O-methyl modified nucleoside, nm is a 2′-O-(2-methoxyethyl) modified nucleoside, and “s” is a phosphorothioate linkage. Base sequences are shown in Table 69.

[0635] Six- to eight-week-old female mice (strain ICR, n=3) were given a subcutaneous injection on Day 0 of a single 50 μg dose of a GalNAc-conjugated siRNA or PBS as vehicle control.

[0636] Mice were euthanized on Day 14 after injection and a liver sample from each was collected and placed in RNAlater (ThermoFisher Catalog #AM7020) until processing. Total liver RNA was prepared by homogenizing the liver tissue in homogenization buffer (Maxwell RSC simplyRNA Tissue Kit) using a Percellys 24 tissue homogenizer (Bertin Instruments) set at 5000 rpm for two 10 second cycles. Total RNA from the lysate was purified on a Maxwell RSC 48 platform (Promega Corporation) according to the manufacturer's recommendations. Preparation of cDNA was performed using Quanta qScript cDNA SuperMix (VWR, Catalog #95048-500) according to the manufacturer's instructions. The relative levels of liver MTRES1 mRNA were assessed by RT-qPCR in triplicate on a QuantStudio™ 6 Pro Real-Time PCR System using TaqMan assays for mouse MTRES1 (ThermoFisher, assay #Mm00471319_m1) and the mouse housekeeping gene PPIA (ThermoFisher, assay #Mm02342430_g1) and PerfeCTa® qPCR FastMix®, Low ROX™ (VWR, Catalog #101419-222). Data were normalized to the mean MTRES1 mRNA level in animals receiving PBS. Results are shown in Table 70. Of the alternatively modified versions of ETD02406, mice injected with ETD02417, ETD02409, ETD02420, or ETD02418 had greatest reductions in mean liver MTRES1 mRNA on Day 14 relative to mice receiving PBS.

TABLE 68
Example siRNA Sequences

| | Sense | | Anti- | |
|---|---|---|---|---|
| | Strand | | sense | |
| | SEQ | Sense Strand | Strand | |
| siRNA | ID | Sequence (5′-3′) | SEQ ID | Antisense Strand Sequence |
| Name | NO: | with GalNAc moiety | NO: | (5′-3′) |
| ETD02406 | 3305 | [ETL17]saagaaAfAfG | 3135 | usCfsaCfcGfuUfcUfgCfuUfuUf |
| | | fCfagaacggugasusu | | cUfususu |
| ETD02409 | 3306 | [ETL17]saagamaAfAf | 3135 | usCfsaCfcGfUfcUfgCfuUfuUf |
| | | GfCfagaamcggugasusu | | cUfususu |
| ETD02413 | 3305 | [ETL17]saagaaAfAfGf | 3319 | usCfsaccGfuUfcUfgCfuUfuUfc |
| | | Cfagaacggugasusu | | Ufususu |
| ETD02414 | 3305 | [ETL17]saagaaAfAfGf | 3320 | usCfsaccGfuUfcUfgcuUfuUfeUf |
| | | Cfagaacggugasusu | | USUSU |
| ETD02415 | 3305 | [ETL17]saagaaAfAfGf | 3321 | usCfsaccGfuUfcugCfuUfuUfcUf |
| | | Cfagaacggugasusu | | usuSU |
| ETD02416 | 3305 | [ETL17]saagaaAfAfG | 3322 | usCfsaCfogUfucUfgCfuUfuUfc |
| | | fCfagaacggugasusu | | Ufususu |
| ETD02417 | 3305 | [ETL17]saagaaAfAfG | 3323 | usCfsacCfgUfucUfgCfuUfuUfc |
| | | fCfagaacggugasUSU | | Ufususu |
| ETD02418 | 3305 | [ETL17]saagaaAfAfG | 3324 | usCfsacCfgUfuCfugcuUfuUfeUf |
| | | fCfagaaeggugasuSU | | USUSU |
| ETD02419 | 3305 | [ETL17]saagaaAfAfG | 3325 | usCfsacCfgUfucUfgcuUfuUfcUf |
| | | fCfagaacggugasuso | | ususu |
| ETD02420 | 3305 | [ETL17]saagaaAfAfG | 3326 | usCfsacCfgUfucUfgcuUfUfcuu |
| | | fCfagaacggugasUSU | | suSu |
| ETD02182 | 3051 | [ETL17]socuacAfAfA | 3142 | usUfsgagUfuCfaCfcUfuUfgUfa |
| | | fGfGfugaacucaasusu | | Gfasusu |
| ETD02459 | 3051 | [ETL17]sucuacAfAfA | 3327 | usUfsgagUfuCfaCfcUfuUfgUfa |
| | | fGfGfugaacucaasusu | | gasusu |

TABLE 69
Example siRNA BASE Sequences

| | | Sense | | Antisense |
|---|---|---|---|---|
| | | Strand | | Strand |
| | SEQ | Base | SEQ | Base |
| siRNA | ID | Sequence | ID | Sequence |
| Name | NO: | (5′ to 3′) | NO: | (5′ to 3′) |
| ETD02406 | 2684 | AAGAAAAGCA | 2866 | UCACCGUUCU |
| | | GAACGGUGAU | | GCUUUUCUUU |
| | | U | | U |
| ETD02409 | 2684 | AAGAAAAGCA | 2866 | UCACCGUUCU |
| | | GAACGGUGAU | | GCUUUUCUUU |
| | | U | | U |
| ETD02413 | 2684 | AAGAAAAGCA | 2866 | UCACCGUUCU |
| | | GAACGGUGAU | | GCUUUUCUUU |
| | | U | | U |
| ETD02414 | 2684 | AAGAAAAGCA | 2866 | UCACCGUUCU |
| | | GAACGGUGAU | | GCUUUUCUUU |
| | | U | | U |
| ETD02415 | 2684 | AAGAAAAGCA | 2866 | UCACCGUUCU |
| | | GAACGGUGAU | | GCUUUUCUUU |
| | | U | | U |
| ETD02416 | 2684 | AAGAAAAGCA | 2866 | UCACCGUUCU |
| | | GAACGGUGAU | | GCUUUUCUUU |
| | | U | | U |
| ETD02417 | 2684 | AAGAAAAGCA | 2866 | UCACCGUUCU |
| | | GAACGGUGAU | | GCUUUUCUUU |
| | | U | | U |
| ETD02418 | 2684 | AAGAAAAGCA | 2866 | UCACCGUUCU |
| | | GAACGGUGAU | | GCUUUUCUUU |
| | | U | | U |
| ETD02419 | 2684 | AAGAAAAGCA | 2866 | UCACCGUUCU |
| | | GAACGGUGAU | | GCUUUUCUUU |
| | | U | | U |
| ETD02420 | 2684 | AAGAAAAGCA | 2866 | UCACCGUUCU |
| | | GAACGGUGAU | | GCUUUUCUUU |
| | | U | | U |
| ETD02182 | 2681 | UCUACAAAGG | 2863 | UUGAGUUCAC |
| | | UGAACUCAAU | | CUUUGUAGAU |
| | | U | | U |
| ETD02459 | 2681 | UCUACAAAGG | 2863 | UUGAGUUCAC |
| | | UGAACUCAAU | | CUUUGUAGAU |
| | | U | | U |

TABLE 70
Relative MTRES1 mRNA Levels in Livers of Mice

| | | | | Mean MTRES1 |
|---|---|---|---|---|
| | | | | mRNA (Normalized |
| Group | n | Treatment | Dose (ug) | to Group 1, Day 14) |
| 1 | 3 | PBS | | 1.00 |
| 2 | 3 | ETD02406 | 50 | 0.46 |
| 3 | 3 | ETD02409 | 50 | 0.27 |
| 4 | 3 | ETD02413 | 50 | 0.73 |
| 5 | 3 | ETD02414 | 50 | 0.70 |
| 6 | 3 | ETD02415 | 50 | 0.48 |
| 7 | 3 | ETD02416 | 50 | 0.51 |
| 8 | 3 | ETD02417 | 50 | 0.18 |
| 9 | 3 | ETD02418 | 50 | 0.31 |
| 10 | 3 | ETD02419 | 50 | 0.44 |
| 11 | 3 | ETD02420 | 50 | 0.29 |
| 12 | 3 | ETD02182 | 50 | 0.22 |
| 13 | 3 | ETD02459 | 50 | 0.28 |

### Example 40: Screening Additional siRNAs Targeting Human MTRES1 mRNA in Mice Transfected with AAV8-TBG-h-MTRES1

[0637] Additional siRNAs targeting human MTRES1 mRNA and cross-reactive with at least cynomolgus monkey MTRES1 mRNA were tested for activity in mice following transfection with an adeno-associated viral vector. The siRNAs were attached to the GalNAc ligand ETL17. The siRNA sequences are shown in Table 71, where Nf is a 2′-fluoro-modified nucleoside, n is a 2′-O-methyl modified nucleoside, “d” is a deoxynucleoside, nm is a 2′-O-(2-methoxyethyl) modified nucleoside, and “s” is a phosphorothioate linkage. Base sequences are shown in Table 72.

[0638] Six- to eight-week-old female mice (C57Bl/6) were injected with 5 μL of a recombinant adeno-associated virus 8 (AAV8) vector (1.4×10E13 genome copies/mL) by the retroorbital route on Day-14. The recombinant AAV8 contained the open reading frame and the majority of the 3′UTR of the human MTRES1 sequence (NM_016487.5) under the control of the human thyroxine binding globulin promoter in an AAV2 backbone packaged in AAV8 capsid (AAV8-TBG-h-MTRES1). On Day 0, infected mice (n=6-7/group) were given a subcutaneous injection of a single 100 μg dose of a GalNAc-conjugated siRNA or PBS as vehicle control.

[0639] Mice were euthanized on Day 14 after subcutaneous injection and a liver sample from each was collected and placed in RNAlater (ThermoFisher Catalog #AM7020) until processing. Total liver RNA was prepared by homogenizing the liver tissue in homogenization buffer (Maxwell RSC simplyRNA Tissue Kit) using a Percellys 24 tissue homogenizer (Bertin Instruments) set at 5000 rpm for two 10 second cycles. Total RNA from the lysate was purified on a Maxwell RSC 48 platform (Promega Corporation) according to the manufacturer's recommendations. Preparation of cDNA was performed using Quanta qScript cDNA SuperMix (VWR, Catalog #95048-500) according to the manufacturer's instructions. The relative levels of liver MTRES1 mRNA were assessed by RT-qPCR in triplicate on a QuantStudio™ 6 Pro Real-Time PCR System using TaqMan assays for human MTRES1 (ThermoFisher, assay #Hs01568158_g1) and the mouse housekeeping gene PPIA (ThermoFisher, assay #Mm02342430_g1) and PerfeCTaR qPCR FastMix®, Low ROX™ (VWR, Catalog #101419-222). Data were normalized to the mean MTRES1 mRNA level in animals receiving PBS. Results are shown in Table 73. Mice injected with ETD02373, ETD02409, or ETD02356 had greatest reductions in mean liver MTRES1 mRNA on Day 14 relative to mice receiving PBS.

TABLE 71
Example siRNA Sequences

| | | Sense | | |
|---|---|---|---|---|
| | | Strand | | |
| | | Sequence | Anti- | |
| | Sense | (5′-3′) | sense | Antisense |
| | Strand | with | Strand | Strand |
| siRNA | SEQ | GalNAc | SEQ | Sequence |
| Name | ID NO: | moiety | ID NO: | (5′-3′) |
| ETD02356 | 3093 | [ETL17] | 3181 | usAfsaGfcA |
| | | sgcuagUfgU | | faUfuUfaAf |
| | | fUfaaauugc | | cAfcUf |
| | | uuasusu | | aGfcsusu |
| ETD02358 | 3095 | [ETL17] | 2339 | usAfsuCfgA |
| | | sguacUfUfC | | fuUfcCfaGf |
| | | fCfUfggaa | | gAfaGf |
| | | ucgauasusu | | uAfcsusu |
| ETD02360 | 3097 | [ETL17] | 2351 | usAfsuUfuG |
| | | saaguUfaCf | | fgUfgCfaCf |
| | | gUfgCfacca | | gUfaAf |
| | | aauasusu | | cUfususu |
| ETD02365 | 3102 | [ETL17] | 3190 | usUfsuCfuC |
| | | sggcuAfgAf | | fcCfaAfuAf |
| | | uAfuuggga | | uCfuAf |
| | | gaaasusu | | gCfcsusu |
| ETD02373 | 3110 | [ETL17] | 3198 | usAfsgAfgA |
| | | scaguUfaUf | | faUfcCfgCf |
| | | gCfggauucu | | aUfaAf |
| | | cuasusu | | cUfgsusu |
| ETD02409 | 3306 | [ETL17] | 3135 | [ETL17]sa |
| | | saagamaAfA | | agamaAfA |
| | | fGfCfagaa | | fGfCfagaa |
| | | mcggugasus | | mcggugasus |
| | | u | | u |
| ETD02379 | 3116 | [ETL17] | 3204 | usUfscUfuA |
| | | sguuuAfaAf | | fgGfcAfaCf |
| | | GfdTuGfcc | | uUfuAf |
| | | uaagaasusu | | aAfcsusu |

TABLE 72
Example siRNA BASE Sequences

| | | Sense | | Antisense |
|---|---|---|---|---|
| | | Strand | | Strand |
| | SEQ | Base | SEQ | Base |
| siRNA | ID | Sequence | ID | Sequence |
| Name | NO: | (5′ to 3′) | NO: | (5′ to 3′) |
| ETD02356 | 2788 | GCUAGUGUUA | 2970 | UAAGCAAUUU |
| | | AAUUGCUUAU | | AACACUAGCU |
| | | U | | U |
| ETD02358 | 2790 | GUACUUCCUG | 2972 | UAUCGAUUCC |
| | | GAAUCGAUAU | | AGGAAGUACU |
| | | U | | U |
| ETD02360 | 2792 | AAGUUACGUG | 2974 | UAUUUGGUGC |
| | | CACCAAAUAU | | ACGUAACUUU |
| | | U | | U |
| ETD02365 | 2797 | GGCUAGAUAU | 2979 | UUUCUCCCAA |
| | | UGGGAGAAAU | | UAUCUAGCCU |
| | | U | | U |
| ETD02373 | 2805 | CAGUUAUGCG | 2987 | UAGAGAAUCC |
| | | GAUUCUCUAU | | GCAUAACUGU |
| | | U | | U |
| ETD02409 | 2684 | GUUUAAAGUU | 2866 | UUCUUAGGCA |
| | | GCCUAAGAAU | | ACUUUAAACU |
| | | U | | U |
| ETD02379 | 3338 | AAGAAAAGCA | 2993 | UCACCGUUCU |
| | | GAACGGUGAU | | GCUUUUCUUU |
| | | U | | U |

TABLE 73
Relative MTRES1 mRNA Levels in Livers of Mice

| | | | | Mean MTRES1 |
|---|---|---|---|---|
| | | | | mRNA (Normalized |
| Group | n | Treatment | Dose (ug) | to Group 1, Day 14) |
| 1 | 7 | PBS | | 1.00 |
| 2 | 6 | ETD02356 | 100 | 0.41 |
| 3 | 7 | ETD02358 | 100 | 0.62 |
| 4 | 7 | ETD02360 | 100 | 1.01 |
| 5 | 6 | ETD02365 | 100 | 0.50 |
| 6 | 7 | ETD02373 | 100 | 0.19 |
| 7 | 6 | ETD02409 | 100 | 0.20 |
| 8 | 7 | ETD02379 | 100 | 0.59 |

### Example 41: Screening MTRES1 siRNAs with Alternative Modification Patterns in Mice

[0640] The base sequences of ETD02409 were synthesized with alternative modification patterns and then tested for activity in mice. The siRNAs were attached to the GalNAc ligand ETL17. The siRNA sequences are shown in Table 74, where Nf is a 2′-fluoro-modified nucleoside, n is a 2′-O-methyl modified nucleoside, nm is a 2′-O-(2-methoxyethyl) modified nucleoside, and “s” is a phosphorothioate linkage. Base sequences are shown in Table 75.

[0641] Six- to eight-week-old female mice (strain ICR, n=3) were given a subcutaneous injection on Day 0 of a single 50 μg dose of a GalNAc-conjugated siRNA or PBS as vehicle control.

[0642] Mice were euthanized on Day 14 after injection and a liver sample from each was collected and placed in RNAlater (ThermoFisher Catalog #AM7020) until processing. Total liver RNA was prepared by homogenizing the liver tissue in homogenization buffer (Maxwell RSC simplyRNA Tissue Kit) using a Percellys 24 tissue homogenizer (Bertin Instruments) set at 5000 rpm for two 10 second cycles. Total RNA from the lysate was purified on a Maxwell RSC 48 platform (Promega Corporation) according to the manufacturer's recommendations. Preparation of cDNA was performed using Quanta qScript cDNA SuperMix (VWR, Catalog #95048-500) according to the manufacturer's instructions. The relative levels of liver MTRES1 mRNA were assessed by RT-qPCR in triplicate on a QuantStudio™ 6 Pro Real-Time PCR System using TaqMan assays for mouse MTRES1 (ThermoFisher, assay #Mm00471319_m1) and the mouse housekeeping gene PPIA (ThermoFisher, assay #Mm02342430_g1) and PerfeCTa® qPCR FastMix®, Low ROX™ (VWR, Catalog #101419-222). Data were normalized to the mean MTRES1 mRNA level in animals receiving PBS. Results are shown in Table 76. Mice injected with ETD02591, ETD02589, or ETD02588 had greatest reductions in mean liver MTRES1 mRNA on Day 14 relative to mice receiving PBS.

TABLE 74
Example siRNA Sequences

| | | Sense | | |
|---|---|---|---|---|
| | | Strand | Anti- | |
| | | Sequence | sense | |
| | Sense | (5′-3′) | Strand | Antisense |
| | Strand | with | SEQ | Strand |
| siRNA | SEQ ID | GalNAc | ID | Sequence |
| Name | NO: | moiety | NO: | (5′-3′) |
| ETD02587 | 3306 | [ETL17] | 3322 | usCfsaCfcg |
| | | saagamaAfA | | UfucUfgCfu |
| | | fGfCfagaam | | UfuUfcUfus |
| | | cggugasusu | | usu |
| ETD02588 | 3306 | [ETL17] | 3323 | usCfsacCfg |
| | | saagamaAfA | | UfucUfgCfu |
| | | fGfCfagaam | | UfuUfcUfus |
| | | cggugasusu | | usu |
| ETD02589 | 3306 | [ETL17] | 3324 | usCfsacCfg |
| | | saagamaAfA | | UfuCfugcuU |
| | | fGfCfagaam | | fuUfcUf |
| | | cggugasusu | | ususu |
| ETD02590 | 3306 | [ETL17] | 3325 | usCfsacCfg |
| | | saagamaAfA | | UfucUfgcuU |
| | | fGfCfagaam | | fuUfcUfusu |
| | | cggugasusu | | su |
| ETD02591 | 3306 | [ETL17] | 3326 | usCfsacCfg |
| | | saagamaAfA | | UfucUfgcuU |
| | | fGfCfagaam | | fuUfcuusus |
| | | cggugasusu | | u |
| ETD02409 | 3306 | [ETL17] | 3135 | usCfsaCfcG |
| | | saagamaAfA | | fuUfcUfgCf |
| | | fGfCfagaam | | uUfuUfcUfu |
| | | cggugasusu | | susu |

TABLE 75
Example siRNA BASE Sequences

| | | Sense | | Antisense |
|---|---|---|---|---|
| | | Strand | | Strand |
| | | Base | | Base |
| | SEQ | Sequence | SEQ | Sequence |
| SiRNA | ID | (5′ to | ID | (5′ to |
| Name | NO: | 3′) | NO: | 3′) |
| ETD02587 | 2684 | AAGAAAAGCA | 2866 | UCACCGUUCU |
| | | GAACGGUGAU | | GCUUUUCUUU |
| | | U | | U |
| ETD02588 | 2684 | AAGAAAAGCA | 2866 | UCACCGUUCU |
| | | GAACGGUGAU | | GCUUUUCUUU |
| | | U | | U |
| ETD02589 | 2684 | AAGAAAAGCA | 2866 | UCACCGUUCU |
| | | GAACGGUGAU | | GCUUUUCUUU |
| | | U | | U |
| ETD02590 | 2684 | AAGAAAAGCA | 2866 | UCACCGUUCU |
| | | GAACGGUGAU | | GCUUUUCUUU |
| | | U | | U |
| ETD02591 | 2684 | AAGAAAAGCA | 2866 | UCACCGUUCU |
| | | GAACGGUGAU | | GCUUUUCUUU |
| | | U | | U |
| ETD02409 | 2684 | AAGAAAAGCA | 2866 | UCACCGUUCU |
| | | GAACGGUGAU | | GCUUUUCUUU |
| | | U | | U |

TABLE 76
Relative MTRES1 mRNA Levels in Livers of Mice

| | | | | Mean MTRES1 |
|---|---|---|---|---|
| | | | | mRNA (Normalized |
| Group | n | Treatment | Dose (ug) | to Group 1, Day 14) |
| 1 | 3 | PBS | | 1.00 |
| 2 | 3 | ETD02587 | 50 | 0.44 |
| 3 | 3 | ETD02588 | 50 | 0.36 |
| 4 | 3 | ETD02589 | 50 | 0.27 |
| 5 | 3 | ETD02590 | 50 | 0.44 |
| 6 | 3 | ETD02591 | 50 | 0.21 |
| 7 | 3 | ETD02409 | 50 | 0.48 |

### Example 42: Screening MTRES1 siRNAs with Alternative Modification Patterns in Mice

[0643] The base sequence of ETD02183 was synthesized with alternative modification patterns and then tested for activity in mice. The siRNAs were attached to the GalNAc ligand ETL17. The siRNA sequences are shown in Table 77, where Nf is a 2′-fluoro-modified nucleoside, n is a 2′-O-methyl modified nucleoside, nm is a 2′-O-(2-methoxyethyl) modified nucleoside, and “s” is a phosphorothioate linkage. Base sequences are shown in Table 78.

[0644] Six- to eight-week-old female mice (strain ICR, n=3) were given a subcutaneous injection on Day 0 of a single 50 μg dose of a GalNAc-conjugated siRNA or PBS as vehicle control.

[0645] Mice were euthanized on Day 14 after injection and a liver sample from each was collected and placed in RNAlater (ThermoFisher Catalog #AM7020) until processing. Total liver RNA was prepared by homogenizing the liver tissue in homogenization buffer (Maxwell RSC simply RNA Tissue Kit) using a Percellys 24 tissue homogenizer (Bertin Instruments) set at 5000 rpm for two 10 second cycles. Total RNA from the lysate was purified on a Maxwell RSC 48 platform (Promega Corporation) according to the manufacturer's recommendations. Preparation of cDNA was performed using Quanta qScript cDNA SuperMix (VWR, Catalog #95048-500) according to the manufacturer's instructions. The relative levels of liver MTRES1 mRNA were assessed by RT-qPCR in triplicate on a QuantStudio™ 6 Pro Real-Time PCR System using TaqMan assays for mouse MTRES1 (ThermoFisher, assay #Mm00471319_m1) and the mouse housekeeping gene PPIA (ThermoFisher, assay #Mm02342430_g1) and PerfeCTaR qPCR FastMix®, Low ROX™ (VWR, Catalog #101419-222). Data were normalized to the mean MTRES1 mRNA level in animals receiving PBS. Results are shown in Table 79.

TABLE 77
Example siRNA Sequences

| | | Sense | | |
|---|---|---|---|---|
| | | Strand | Anti- | |
| | Sense | Sequence | sense | |
| | Strand | (5′-3′) | Strand | Antisense |
| | SEQ | with | SEQ | Strand |
| siRNA | ID | GalNAc | ID | Sequence |
| Name | NO: | moiety | NO: | (5′-3′) |
| ETD02183 | 3051 | [ETL17] | 3143 | usUfsgaGfu |
| | | sucuacAfAf | | UfcaCfcUfu |
| | | AfGfGfugaa | | UfgUfa |
| | | cucaasus | | Gfasusu |
| | | u | | |
| ETD02581 | 3307 | [ETL17] | 3143 | usUfsgaGfu |
| | | sucuamcAfA | | UfcaCfcUfu |
| | | fAfGfgug | | UfgUfa |
| | | maacucaasu | | Gfasusu |
| | | su | | |
| ETD02582 | 3308 | [ETL17] | 3143 | usUfsgaGfu |
| | | sucuamcAfA | | UfcaCfcUfu |
| | | fAfGfgugam | | UfgUfaGfas |
| | | acucaasusu | | usu |
| ETD02583 | 3309 | [ETL17] | 3143 | usUfsgaGfu |
| | | sucuamcAfA | | UfcaCfcUfu |
| | | fAfGfgugaa | | UfgUfaGfas |
| | | mcucaasusu | | usu |

TABLE 78
Example siRNA BASE Sequences

| | | Sense | | Antisense |
|---|---|---|---|---|
| | | Strand | | Strand |
| | | Base | | Base |
| | | Sequence | | Sequence |
| | SEQ | (5′ | SEQ | (5′ |
| siRNA | ID | to | ID | to |
| Name | NO: | 3′) | NO: | 3′) |
| ETD02183 | 3143 | UCUACAAAGG | 2863 | UUGAGUUCAC |
| | | UGAACUCAAU | | CUUUGUAGAU |
| | | U | | U |
| ETD02581 | 3143 | UCUACAAAGG | 2863 | UUGAGUUCAC |
| | | UGAACUCAAU | | CUUUGUAGAU |
| | | U | | U |
| ETD02582 | 3143 | UCUACAAAGG | 2863 | UUGAGUUCAC |
| | | UGAACUCAAU | | CUUUGUAGAU |
| | | U | | U |
| ETD02583 | 3143 | UCUACAAAGG | 2863 | UUGAGUUCAC |
| | | UGAACUCAAU | | CUUUGUAGAU |
| | | U | | U |

TABLE 79
Relative MTRES1 mRNA Levels in Livers of Mice

| | | | | Mean MTRES1 |
|---|---|---|---|---|
| | | | | mRNA (Normalized |
| Group | n | Treatment | Dose (ug) | to Group 1, Day 14) |
| 1 | 3 | PBS | | 1.00 |
| 2 | 3 | ETD02183 | 50 | 0.25 |
| 3 | 3 | ETD02581 | 50 | 0.42 |
| 4 | 3 | ETD02582 | 50 | 0.44 |
| 5 | 3 | ETD02583 | 50 | 0.32 |

### Example 43: Screening MTRES1 siRNAs with Alternative Modification Patterns in Mice

[0646] The base sequence of ETD02548 was synthesized with alternative modification patterns and then tested for activity in mice. The siRNAs were attached to the GalNAc ligand ETL17. The siRNA sequences are shown in Table 80, where Nf is a 2′-fluoro-modified nucleoside, n is a 2′-O-methyl modified nucleoside, nm is a 2′-O-(2-methoxyethyl) modified nucleoside, and “s” is a phosphorothioate linkage. Base sequences are shown in Table 81.

[0647] Six- to eight-week-old female mice (strain ICR, n=3) were given a subcutaneous injection on Day 0 of a single 60 μg dose of a GalNAc-conjugated siRNA or PBS as vehicle control. Mice were euthanized on Day 14 after injection and a liver sample from each was collected and placed in RNAlater (ThermoFisher Catalog #AM7020) until processing. Total liver RNA was prepared by homogenizing the liver tissue in homogenization buffer (Maxwell RSC simplyRNA Tissue Kit) using a Percellys 24 tissue homogenizer (Bertin Instruments) set at 5000 rpm for two 10 second cycles. Total RNA from the lysate was purified on a Maxwell RSC 48 platform (Promega Corporation) according to the manufacturer's recommendations. Preparation of cDNA was performed using Quanta qScript cDNA SuperMix (VWR, Catalog #95048-500) according to the manufacturer's instructions. The relative levels of liver MTRES1 mRNA were assessed by RT-qPCR in triplicate on a QuantStudio™ 6 Pro Real-Time PCR System using TaqMan assays for mouse MTRES1 (ThermoFisher, assay #Mm00471319_m1) and the mouse housekeeping gene PPIA (ThermoFisher, assay #Mm02342430_g1) and PerfeCTa® qPCR FastMix®, Low ROX™ (VWR, Catalog #101419-222). Data were normalized to the mean MTRES1 mRNA level in animals receiving PBS. Results are shown in Table 82.

TABLE 80
Example siRNA Sequences

| | | Sense | | |
|---|---|---|---|---|
| | | Strand | Anti- | |
| | Sense | Sequence | sense | |
| | Strand | (5′-3′) | Strand | Antisense |
| | SEQ | with | SEQ | Strand |
| siRNA | ID | GalNAc | ID | Sequence |
| Name | NO: | moiety | NO: | (5′-3′) |
| ETD02548 | 3310 | [ETL17] | 3328 | usAfsccGfu |
| | | sgaagmaAfA | | UfcuGfcUfu |
| | | fAfGfcagam | | UfuCfuuc |
| | | acgguasusu | | susu |
| ETD02763 | 3311 | [ETL17] | 3328 | usAfsccGfu |
| | | sgaagmaaAf | | UfcuGfcUfu |
| | | AfGfCfagam | | UfuCfuuc |
| | | acggu | | susu |
| | | asusu | | |
| ETD02764 | 3312 | [ETL17] | 3329 | usAfsccGfu |
| | | sgaagmAfaA | | UfcuGfcUfu |
| | | fAfGfCfaga | | UfuCfuuc |
| | | macgg | | susu |
| | | uasusu | | |
| ETD02765 | 3312 | [ETL17] | 3330 | usAfsccgUf |
| | | sgaagmaAfA | | UfcuGfcUfu |
| | | fAfGfcagam | | UfuCfuuc |
| | | acggu | | susu |
| | | asusu | | |
| ETD02766 | 3312 | [ETL17] | 3331 | usAfsccGfu |
| | | sgaagmaAfA | | UfCfuGfcuu |
| | | fAfGfcagam | | UfuCfuuc |
| | | acggu | | susu |
| | | asusu | | |
| ETD02767 | 3306 | [ETL17] | 3326 | usAfsccGfu |
| | | sgaagmaAfA | | UfCfugcUfu |
| | | fAfGfcagam | | UfuCfuuc |
| | | acggu | | susu |
| | | asusu | | |
| ETD0259 | 3051 | [ETL17] | 3143 | usCfsacCfg |
| | | saagamaAfA | | UfucUfgcuU |
| | | fGfCfagaam | | fuUfcuus |
| | | cggug | | usu |
| | | asusu | | |
| ETD02183 | 3312 | [ETL17] | 3328 | usUfsgaGfu |
| | | sucuacAfAf | | UfcaCfcUfu |
| | | AfGfGfugaa | | UfgUfaGf |
| | | cucaas | | asusu |
| | | usu | | |
| ETD02181 | 3051 | [ETL17] | 3141 | usUfsgagUf |
| | | sucuacAfAf | | uCfaCfcuuU |
| | | AfGfGfugaa | | fgUfaGfa |
| | | cucaasusu | | susu |

TABLE 81
Example siRNA BASE Sequences

| | | Sense | | Antisense |
|---|---|---|---|---|
| | | Strand | | Strand |
| | | Base | | Base |
| | SEQ | Sequence | SEQ | Sequence |
| siRNA | ID | (5′ | ID | (5′ |
| Name | NO: | to 3′) | NO: | to 3′) |
| ETD02548 | 2683 | GAAGAAAAGC | 2865 | UACCGUUCUG |
| | | AGAACGGUAU | | CUUUUCUUCU |
| | | U | | U |
| ETD02763 | 2683 | GAAGAAAAGC | 2865 | UACCGUUCUG |
| | | AGAACGGUAU | | CUUUUCUUCU |
| | | U | | U |
| ETD02764 | 2683 | GAAGAAAAGC | 2865 | UACCGUUCUG |
| | | AGAACGGUAU | | CUUUUCUUCU |
| | | U | | U |
| ETD02765 | 2683 | GAAGAAAAGC | 2865 | UACCGUUCUG |
| | | AGAACGGUAU | | CUUUUCUUCU |
| | | U | | U |
| ETD02766 | 2683 | GAAGAAAAGC | 2865 | UACCGUUCUG |
| | | AGAACGGUAU | | CUUUUCUUCU |
| | | U | | U |
| ETD02767 | 2684 | GAAGAAAAGC | 2866 | UACCGUUCUG |
| | | AGAACGGUAU | | CUUUUCUUCU |
| | | U | | U |
| ETD02591 | 2681 | AAGAAAAGCA | 2863 | UCACCGUUCU |
| | | GAACGGUGAU | | GCUUUUCUUU |
| | | U | | U |
| ETD02183 | 2683 | UCUACAAAGG | 2865 | UUGAGUUCAC |
| | | UGAACUCAAU | | CUUUGUAGAU |
| | | U | | U |
| ETD02181 | 2681 | UCUACAAAGG | 2863 | UUGAGUUCAC |
| | | UGAACUCAAU | | CUUUGUAGAU |
| | | U | | U |

TABLE 82
Relative MTRES1 mRNA Levels in Livers of Mice

| | | | | Mean MTRES1 |
|---|---|---|---|---|
| | | | | mRNA (Normalized |
| Group | n | Treatment | Dose (ug) | to Group 1, Day 14) |
| 1 | 3 | PBS | | 1.00 |
| 2 | 3 | ETD02763 | 60 | 0.25 |
| 3 | 3 | ETD02764 | 60 | 0.29 |
| 4 | 3 | ETD02765 | 60 | 0.26 |
| 5 | 3 | ETD02766 | 60 | 0.21 |
| 6 | 3 | ETD02767 | 60 | 0.22 |
| 7 | 3 | ETD02591 | 60 | 0.25 |
| 8 | 3 | ETD02183 | 60 | 0.25 |
| 9 | 3 | ETD02548 | 60 | 0.19 |
| 10 | 3 | ETD02181 | 60 | 0.16 |

### Example 44: Screening MTRES1 siRNAs with Alternative Modification Patterns in Mice

[0648] The base sequence ETD02591 was synthesized with alternative modification patterns and then tested for activity in mice. The siRNAs were attached to the GalNAc ligand ETL17. The siRNA sequences are shown in Table 83, where Nf is a 2′-fluoro-modified nucleoside, n is a 2′-O-methyl modified nucleoside, [NUNA] is a unlocked nucleic acid, nm is a 2′-O-(2-methoxyethyl) modified nucleoside, “i” is a 2′-O-methyl inosine nucleoside, and “s” is a phosphorothioate linkage. Base sequences are depicted in Table 84.

[0649] Six- to eight-week-old female mice (strain ICR, n=3) were given a subcutaneous injection on Day 0 of a single 60 μg dose of a GalNAc-conjugated siRNA or PBS as vehicle control. Mice were euthanized on Day 14 after injection and a liver sample from each was collected and placed in RNAlater (ThermoFisher Catalog #AM7020) until processing. Total liver RNA was prepared by homogenizing the liver tissue in homogenization buffer (Maxwell RSC simplyRNA Tissue Kit) using a Percellys 24 tissue homogenizer (Bertin Instruments) set at 5000 rpm for two 10 second cycles. Total RNA from the lysate was purified on a Maxwell RSC 48 platform (Promega Corporation) according to the manufacturer's recommendations. Preparation of cDNA was performed using Quanta qScript cDNA SuperMix (VWR, Catalog #95048-500) according to the manufacturer's instructions. The relative levels of liver MTRES1 mRNA were assessed by RT-qPCR in triplicate on a QuantStudio™ 6 Pro Real-Time PCR System using TaqMan assays for mouse MTRES1 (ThermoFisher, assay #Mm00471319_m1) and the mouse housekeeping gene PPIA (ThermoFisher, assay #Mm02342430_g1) and PerfeCTa® qPCR FastMix®, Low ROX™ (VWR, Catalog #101419-222). Data were normalized to the mean MTRES1 mRNA level in animals receiving PBS. Results are shown in Table 85.

TABLE 83
Example siRNA Sequences

| | | Sense | | |
|---|---|---|---|---|
| | | Strand | Anti- | |
| | Sense | Sequence | sense | |
| | Strand | (5′-3′) | Strand | Antisense |
| | SEQ | with | SEQ | Strand |
| siRNA | ID | GalNAc | ID | Sequence |
| Name | NO: | moiety | NO: | (5′-3′) |
| ETD02591 | 3306 | [ETL17] | 3326 | usCfsacCfg |
| | | saagamaAfA | | UfucUfgcuU |
| | | fGfCfagaam | | fuUfcuu |
| | | oggugasusu | | susu |
| ETD02756 | 3313 | [ETLI7] | 3326 | usCfsacCfg |
| | | saagamaaAf | | UfucUfgcuU |
| | | GfCfAfgaam | | fuUfcuu |
| | | oggugasusu | | susu |
| ETD02757 | 3314 | [ETLI7] | 3326 | usCfsacCfg |
| | | saagamAfaA | | UfucUfgcuU |
| | | fGfCfAfgaa | | fuUfcuu |
| | | mcggugasus | | susu |
| | | u | | |
| ETD02758 | 3306 | [ETL17] | 3332 | usCfsaccGf |
| | | saagamaAfA | | UfucUfgcuU |
| | | fGfCfagaam | | fuUfcuu |
| | | cegugasusu | | susu |
| ETD02759 | 3306 | [ETL17] | 3333 | usCfsaccgU |
| | | saagamaAfA | | fUfcUfgcuU |
| | | fGfCfagaam | | fuUfcuu |
| | | cggugasusu | | susu |
| ETD02760 | 3306 | [ETL17] | 3334 | usCfsacCfg |
| | | saagamaAfA | | UfUfcUfgcu |
| | | fGfCfagaam | | UfuUfcu |
| | | cggugasusu | | ususu |
| ETD02894 | 3306 | [ETL17] | 3335 | usCfsacCfg |
| | | saagamaAfA | | [UUNA] |
| | | fGfCfagaam | | ucUfgcuUfu |
| | | cggugasusu | | Ufcuususu |
| ETD02895 | 3306 | [ETL17] | 3336 | usCfsacCf[ |
| | | saagamaAfA | | GUNA]fucUf |
| | | fGfCfagaam | | gcuUf |
| | | cggugasusu | | uUfcuususu |
| ETD02906 | 3315 | [ETL17] | 3326 | usCfsacCfg |
| | | saagamaAfA | | UfucUfgcuU |
| | | fGfCfagaam | | fuUfcuu |
| | | cgguiasusu | | susu |
| ETD02907 | 3316 | [ETL17] | 3326 | usCfsacCfg |
| | | saagamaAfA | | UfucUfgcuU |
| | | fGfCfagaam | | fuUfcuu |
| | | cgiugasusu | | susu |

TABLE 84
Example siRNA BASE Sequences

| | | Sense | | Antisense |
|---|---|---|---|---|
| | | Strand | | Strand |
| | | Base | | Base |
| | SEQ | Sequence | SEQ | Sequence |
| siRNA | ID | (5′ | ID | (5′ |
| Name | NO: | to 3′) | NO: | to 3′) |
| ETD02591 | 2684 | AAGAAAAGCA | 2866 | UCACCGUUCU |
| | | GAACGGUGAU | | GCUUUUCUUU |
| | | U | | U |
| ETD02756 | 2684 | AAGAAAAGCA | 2866 | UCACCGUUCU |
| | | GAACGGUGAU | | GCUUUUCUUU |
| | | U | | U |
| ETD02757 | 2684 | AAGAAAAGCA | 2866 | UCACCGUUCU |
| | | GAACGGUGAU | | GCUUUUCUUU |
| | | U | | U |
| ETD02758 | 2684 | AAGAAAAGCA | 2866 | UCACCGUUCU |
| | | GAACGGUGAU | | GCUUUUCUUU |
| | | U | | U |
| ETD02759 | 2684 | AAGAAAAGCA | 2866 | UCACCGUUCU |
| | | GAACGGUGAU | | GCUUUUCUUU |
| | | U | | U |
| ETD02760 | 2684 | AAGAAAAGCA | 2866 | UCACCGUUCU |
| | | GAACGGUGAU | | GCUUUUCUUU |
| | | U | | U |
| ETD02894 | 2684 | AAGAAAAGCA | 2866 | UCACCGUUCU |
| | | GAACGGUGAU | | GCUUUUCUUU |
| | | U | | U |
| ETD02895 | 2684 | AAGAAAAGCA | 2866 | UCACCGUUCU |
| | | GAACGGUGAU | | GCUUUUCUUU |
| | | U | | U |
| ETD02906 | 2684 | AAGAAAAGCA | 2866 | UCACCGUUCU |
| | | GAACGGUGAU | | GCUUUUCUUU |
| | | U | | U |
| ETD02907 | 2684 | AAGAAAAGCA | 2866 | UCACCGUUCU |
| | | GAACGGUGAU | | GCUUUUCUUU |
| | | U | | U |

TABLE 85
Relative MTRES1 mRNA Levels in Livers of Mice

| | | | | Mean MTRES1 |
|---|---|---|---|---|
| | | | | mRNA (Normalized |
| Group | n | Treatment | Dose (ug) | to Group 1, Day 14) |
| 1 | 3 | PBS | | 1.00 |
| 2 | 3 | ETD02591 | 60 | 0.31 |
| 3 | 3 | ETD02756 | 60 | 0.18 |
| 4 | 3 | ETD02757 | 60 | 0.22 |
| 5 | 3 | ETD02758 | 60 | 0.31 |
| 6 | 3 | ETD02759 | 60 | 0.38 |
| 7 | 3 | ETD02760 | 60 | 0.32 |
| 8 | 3 | ETD02894 | 60 | 0.85 |
| 9 | 3 | ETD02895 | 60 | 0.64 |
| 10 | 3 | ETD02906 | 60 | 0.35 |
| 11 | 3 | ETD02907 | 60 | 0.29 |

### Example 45: CNS Delivery of MTRES1 siRNAs in Catheterized Rats

[0650] Rats were placed in ventral recumbancy and an incision was made parallel to the midline to expose the L2 spinous process. A pre-made catheter was inserted between L1 and L2, advanced cranially, and secured in place. The external part of the catheter is tunneled subcutaneously, exteriorized, and secured just below the scapular region using wound clips.

[0651] Duplexes formulated at 30 mg ml⁻¹ in 0.9% NaCl in water were administered as 30-u1 IT injections in male Sprague Dawley rats (N=5) 250-300 g. siRNA was administered using a sterile tuberculin syringe and 27-gauge needle. Bolus injections of 30 μl were administered over a period of 10-15 seconds. Following injection, the catheter was flushed with 40 μl vehicle. Sequences are depicted in Tables 86-87.

[0652] Rats were euthanized on Day 14 after injection and samples of liver, kidney, frontal cortex, hippocampus, brain stem, cerebellum, and the spinal cord from each were collected, flash frozen in liquid nitrogen, and stored at −80° C. until processing. Total RNA was prepared by homogenizing the tissue in homogenization buffer (Maxwell RSC simplyRNA Tissue Kit) using a Percellys 24 tissue homogenizer (Bertin Instruments) set at 5000 rpm for two 10 second cycles. Total RNA from the lysate was purified on a Maxwell RSC 48 platform (Promega Corporation) according to the manufacturer's recommendations. Preparation of cDNA was performed using Quanta qScript cDNA SuperMix (VWR, Catalog #95048-500) according to the manufacturer's instructions. The relative levels of MTRES1 mRNA were assessed by RT-qPCR in triplicate on a QuantStudio™ 6 Pro Real-Time PCR System using TaqMan assays for rat MTRES1 (ThermoFisher, assay #Rn01441122_m1) and the rat housekeeping gene PPIA (ThermoFisher, assay #Rn00630933_m1) and PerfeCTa® qPCR FastMix®, Low ROX™ (VWR, Catalog #101419-222). Data were normalized to the mean MTRES1 mRNA level in animals receiving vehicle (saline) control. Results are shown in table below. Rats injected with either ETD02793 or ETD02275 showed a decrease in MTRES1 mRNA compared to rats receiving vehicle in all tissues examined. Results are depicted in Table 88.

TABLE 86
Example siRNA Sequences

| | | Sense | | |
|---|---|---|---|---|
| | | Strand | Anti- | |
| | Sense | Sequence | sense | Antisense |
| | Strand | (5′-3′) | Strand | Strand |
| siRNA | SEQ | with | SEQ | Sequence |
| Name | ID NO: | moiety | ID NO: | (5′-3′) |
| ETD02793 | 3296 | [ETL20] | 3337 | 5VPusCfsac |
| | | aagamaAfAf | | CfgUfucUfg |
| | | GfCfagaamc | | cuUfuUfcu |
| | | g | | ususu |
| ETD02275 | 3242 | [ETL20] | 3248 | 5VPusAfscc |
| | | gaagAfAfAf | | gUfuCfuGfc |
| | | AfGfcagaac | | UfuUfuCfuU |
| | | gguasusu | | fcsusu |

[0653] Where 5VP is vinyl phosphonate at 5′ end of antisense strand using 5′-POM-vinyl phosphonate, 2′-OMe-U CE-Phosphoramidite (Biosearch Technologies, 2579).

TABLE 87
Example siRNA BASE Sequences

| | | Sense | | Antisense |
|---|---|---|---|---|
| | | Strand | | Strand |
| | | Base | | Base |
| | SEQ | Sequence | SEQ | Sequence |
| siRNA | ID | (5′ | ID | (5′ |
| Name | NO: | to 3′) | NO: | to 3′) |
| ETD02793 | 2684 | AAGAAAAGCA | 2866 | UCACCGUUCU |
| | | GAACGGUGAU | | GCUUUUCUUU |
| | | U | | U |
| ETD02275 | 2683 | GAAGAAAAGC | 2865 | UACCGUUCUG |
| | | AGAACGGUAU | | CUUUUCUUCU |
| | | U | | U |

TABLE 88
Relative MTRES1 mRNA Levels in Mouse Tissues

| | vehicle control | | ETD02793 | | ETD02275 | |
|---|---|---|---|---|---|---|
| | Relative | | Relative | | Relative | |
| Tissue | mRNA | n | mRNA | n | mRNA | n |
| Kidney | 1.00 | 5 | 0.44 | 5 | 0.32 | 5 |
| Liver | 1.00 | 5 | 0.76 | 5 | 0.51 | 5 |
| Lumbar Spinal Cord | 1.00 | 5 | 0.49 | 5 | 0.18 | 5 |
| Thoracic Spinal Cord | 1.00 | 5 | 0.17 | 5 | 0.15 | 5 |
| Cervical Spinal Cord | 1.00 | 5 | 0.25 | 5 | 0.18 | 5 |
| Cerebellum | 1.00 | 5 | 0.17 | 5 | 0.26 | 5 |
| Brain Stem | 1.00 | 5 | 0.22 | 5 | 0.25 | 5 |
| Hippocampus | 1.00 | 5 | 0.14 | 5 | 0.23 | 5 |
| Frontal Cortex | 1.00 | 5 | 0.22 | 5 | 0.25 | 5 |

### Example 46: CNS Delivery of MTRES1 siRNAs in Catheterized Rat

[0654] Duplexes formulated at 30 mg ml⁻¹ in 0.9% NaCl in water were administered as 30-μl IT injections in Sprague Dawley rats (N=5/group) 250-300 g surgically implanted with an intrathecal catheter. siRNA was administered using a sterile Hamilton syringe and 23-gauge needle. Bolus injections of 30 μl were administered over a period of 10-15 seconds. Following injection, the catheter was flushed with 40 μl vehicle Sequences are depicted in Tables 89-90.

[0655] Rats were euthanized on Day 14 after injection and samples of liver, kidney, frontal cortex, hippocampus, brain stem, cerebellum, and the spinal cord from each were collected, flash frozen in liquid nitrogen and stored at −80° C. until processing. Total RNA was prepared by homogenizing the tissue in homogenization buffer (Maxwell RSC simplyRNA Tissue Kit) using a Percellys 24 tissue homogenizer (Bertin Instruments) set at 5000 rpm for two 10 second cycles. Total RNA from the lysate was purified on a Maxwell RSC 48 platform (Promega Corporation) according to the manufacturer's recommendations. Preparation of cDNA was performed using Quanta qScript cDNA SuperMix (VWR, Catalog #95048-500) according to the manufacturer's instructions. The relative levels of MTRES1 mRNA were assessed by RT-qPCR in triplicate on a QuantStudio™ 6 Pro Real-Time PCR System using TaqMan assays for rat MTRES1 (ThermoFisher, assay #Rn01441122_m1) and the rat housekeeping gene PPIA (ThermoFisher, assay #Rn00630933_m1) and PerfeCTaR qPCR FastMix®, Low ROX™ (VWR, Catalog #101419-222). Data were normalized to the mean MTRES1 mRNA level in animals receiving vehicle (saline) control. Results are shown in table below. Rats injected with either ETD02968, ETD02793, or ETD03000 showed a decrease in MTRES1 mRNA compared to rats receiving vehicle in all CNS tissues examined. Results are depicted in Table 91.

TABLE 89
Example siRNA Sequences

| | | Sense | | |
|---|---|---|---|---|
| | | Strand | Anti- | |
| | Sense | Sequence | sense | Antisense |
| | Strand | (5′-3′) | Strand | Strand |
| siRNA | SEQ ID | with | SEQ ID | Sequence |
| Name | NO: | moiety | NO: | (5′-3′) |
| ETD02968 | 3318 | asasgamaA( | 3337 | 5VPusCfsac |
| | | C16)AfGfCf | | CfgUfucUfg |
| | | agaamcggug | | cuUfuUfcuu |
| | | asusu | | susu |
| ETD02793 | 3296 | [ETL20] | 3337 | 5VPusCfsac |
| | | aagamaAfAf | | CfgUfucUfg |
| | | GfCfagaamc | | cuUfuUfcuu |
| | | ggugasusu | | susu |
| ETD03000 | 3317 | [ETL20] | 3337 | 5VPusCfsac |
| | | aagamaaAfG | | CfgUfucUfg |
| | | fCfAfgaamc | | cuUfuUfcuu |
| | | gg | | susu |

[0656] Where 5VP is vinyl phosphonate at 5′ end of antisense strand using 5′-POM-vinyl phosphonate, 2′-OMe-U CE-Phosphoramidite (Biosearch Technologies, 2579) and A(C16) is 2′-O-hexadecyl adenylate.

TABLE 90
Example siRNA BASE Sequences

| | | Sense | | Antisense |
|---|---|---|---|---|
| | | Strand | | Strand |
| | | Base | | Base |
| | SEQ | Sequence | SEQ | Sequence |
| siRNA | ID | (5′ | ID | (5′ |
| Name | NO: | to 3′) | NO: | to 3′) |
| ETD02968 | 2684 | AAGAAAAGCA | 2866 | UCACCGUUCU |
| | | GAACGGUGAU | | GCUUUUCUUU |
| | | U | | U |
| ETD02793 | 2684 | AAGAAAAGCA | 2866 | UCACCGUUCU |
| | | GAACGGUGAU | | GCUUUUCUUU |
| | | U | | U |
| ETD03000 | 2684 | AAGAAAAGCA | 2866 | UCACCGUUCU |
| | | GAACGGUGAU | | GCUUUUCUUU |
| | | U | | U |

TABLE 91
Relative MTRES1 mRNA Levels in Rat Tissues

| | Vehicle Control | | ETD02968 | | ETD02793 | | ETD03000 | |
|---|---|---|---|---|---|---|---|---|
| | Relative | | Relative | | Relative | | Relative | |
| Tissue | mRNA | n | mRNA | n | mRNA | n | mRNA | n |
| Kidney | 1.00 | 5 | 0.96 | 5 | 0.48 | 5 | 0.24 | 5 |
| Liver | 1.00 | 5 | 0.49 | 5 | 0.90 | 5 | 0.67 | 5 |
| Lumbar Spinal Cord | 1.00 | 5 | 0.15 | 5 | 0.13 | 5 | 0.10 | 5 |
| Thoracic Spinal Cord | 1.00 | 5 | 0.09 | 5 | 0.17 | 5 | 0.13 | 5 |
| Cervical Spinal Cord | 1.00 | 5 | 0.11 | 5 | 0.18 | 5 | 0.18 | 5 |
| Cerebellum | 1.00 | 5 | 0.40 | 5 | 0.13 | 5 | 0.11 | 5 |
| Brain Stem | 1.00 | 5 | 0.21 | 5 | 0.14 | 5 | 0.16 | 5 |
| Hippocampus | 1.00 | 5 | 0.25 | 5 | 0.14 | 5 | 0.11 | 5 |
| Frontal Cortex | 1.00 | 5 | 0.50 | 5 | 0.18 | 5 | 0.18 | 5 |

### Example 47: Determining the Activity of siRNAs ETD02183, ETD02189, ETD02591, and ETD02373 Targeting MTRES1 in a Single Dose Study in Non-Human Primates

[0657] Four groups of four male cynomolgus monkeys >3 years old were utilized for this study. Monkeys were maintained on normal chow with ad libitum access throughout the study except prior to blood collections in which they were fasted overnight (at least 12 hours). On study Day 0, cynomolgus monkeys were injected subcutaneously (2 mL/kg) with a single dose of 3 mg/kg ETD02183, ETD02189, ETD02591, and ETD02373 at a concentration of 1.5 mg/mL. The sequence of the siRNAs used are shown in Table 92, where Nf (e.g. Af, Cf, Gf, Tf, or Uf) is a 2′-fluoro-modified nucleoside, n (e.g. a, c, g, t, or u) is a 2′-O-methyl modified nucleoside, and “s” is a phosphorothioate linkage. The base sequences for each siRNA are shown in Table 93.

TABLE 92
Example siRNA Sequence

| | | Sense Strand | | |
|---|---|---|---|---|
| | | Sequence | | Antisense |
| | SEQ | (5′-3′) with | SEQ | Strand |
| | ID | GalNAc | ID | Sequence |
| ETD# | NO: | moiety | NO: | (5′-3′) |
| ETD02183 | 3051 | [ETL17]sucua | 3143 | usUfsgaGfuU |
| | | cAfAfAfGfGfu | | fcaCfcUfuUf |
| | | gaacucaasusu | | gUfaGfasusu |
| ETD02189 | 3060 | [ETL17]sgaag | 3150 | usAfsccgUfu |
| | | AfAfAfAfGfca | | CfuGfcUfuUf |
| | | gaacgguasusu | | uCfuUfcsusu |
| ETD02591 | 3306 | [ETL 17]saag | 3326 | usCfsacCfgU |
| | | amaAfAfGfCfa | | fucUfgcuUfu |
| | | gaamcggugasu | | Ufcuususu |
| | | su | | |
| ETD02373 | 3110 | [ETL17]scagu | 3198 | usAfsgAfgAf |
| | | UfaUfgCfggau | | aUfcCfgCfaU |
| | | ucucuasusu | | faAfcUfgsus |
| | | | | u |

TABLE 93
Example siRNA BASE Sequence

| | SEQ | Sense Strand | SEQ | Antisense Strand |
|---|---|---|---|---|
| siRNA | ID | Base Sequence | ID | Base Sequence |
| Name | NO: | (5′ to 3′) | NO: | (5′ to 3′) |
| ETD02183 | 2681 | UCUACAAAGGU | 2863 | UUGAGUUCACC |
| | | GAACUCAAUU | | UUUGUAGAUU |
| ETD02189 | 2683 | GAAGAAAAGCA | 2865 | UACCGUUCUGC |
| | | GAACGGUAUU | | UUUUCUUCUU |
| ETD02591 | 2684 | AAGAAAAGCAG | 2866 | UCACCGUUCUG |
| | | AACGGUGAUU | | CUUUUCUUUU |
| ETD02373 | 2805 | CAGUUAUGCGG | 2987 | UAGAGAAUCCG |
| | | AUUCUCUAUU | | CAUAACUGUU |

[0658] Body weights were recorded weekly on Days −8, −2, 7, 14, 21, and 28 of the study. On study Days −8, −2, 7, 14, 21, 28, and 56 whole blood was collected into tubes with no anti-coagulant and centrifuged to obtain serum after clotting. Clinical chemistry for ALT, AST, ALP, DBIL, TBIL, GLU, UREA, CREA, TG, CHOL, TP, GGT, HDL-CH, LDL-CH, and B-HDBH were analyzed.

[0659] On study Day-8, Day 28, and Day 56 a 5 mg liver biopsy was collected by anesthetizing the animals with Zoletil (1.5-5.0 mg/kg, i.m.) and xylazine (0.5-2.0 mg/kg, i.m.). The liver biopsy was then placed into 10 v/v RNAlater™ Stabilization Solution (Thermo Fisher, Catalog #AM7020) in 20 seconds and stored for 24 hours at 4° C. The RNAlater was then removed, and the liver tissue was stored in the freezer until they were shipped to Empirico.

[0660] Total liver RNA was prepared by homogenizing the RNAlater liver tissue in homogenization buffer (Maxwell RSC simplyRNA Tissue Kit) using a Percellys 24 tissue homogenizer (Bertin Instruments) set at 5000 rpm for two 10 second cycles. Total RNA from the lysate was purified on a Maxwell RSC 48 platform (Promega Corporation) according to the manufacturer's recommendations. Preparation of cDNA was performed using Quanta qScript cDNA SuperMix (VWR, Catalog #95048-500) according to the manufacturer's instructions. The levels of liver MTRES1 mRNA were assessed by RT-qPCR in triplicate on a QuantStudio™ 6 Pro Real-Time PCR System using TaqMan assays for monkey MTRES1 (Custom Taqman primers and probe: Primer 1 GAT GCA TTC TAC AAA GGT CAA CTC, Primer 2 CTG TCT CTG TTC CTG CTT CTT, Probe/56-FAM/AA GCA GAA C/ZEN/G GTG AAA GTG GGA GA/3IABKFQ/), and the monkey housekeeping gene GUSB (ThermoFisher, assay #Mf04392546_g1) using PerfeCTa® qPCR FastMix®, Low ROX™ (VWR, Catalog #101419-222).

[0661] The results of the liver biopsy mRNA analysis are summarized in Table 94. Data for individual animals was normalized to its Day-8 liver biopsy mRNA levels using the delta-delta Ct method. No reduction in liver MTRES1 mRNA was observed with a single dose of ETD02183. A 65% mean reduction in liver MTRES1 mRNA was observed with a single dose of ETD02189 at Day 28 after injection and a 26% mean reduction at Day 56. A 79% mean reduction in liver MTRES1 mRNA was observed with a single dose of ETD02591 and 66% reduction at Day 56. A 37% reduction in liver MTRES1 mRNA was observed with a single dose of ETD02373 and a 13% reduction at Day 56.

[0662] There were no significant changes in body weight or any of the clinical chemistry parameters measured during this study.

TABLE 94
MTRES1 Liver mRNA Levels in Monkeys Treated with
ETD02183, ETD02189, ETD02591, and ETD02373

| | | | Mean | | Mean | | Mean |
|---|---|---|---|---|---|---|---|
| | | Relative | Relative | Relative | Relative | Relative | Relative |
| | | Liver | Liver | Liver | Liver | Liver | Liver |
| | | MTRES1 | MTRES1 | MTRES1 | MTRES1 | MTRES1 | MTRES1 |
| | | mRNA | mRNA | mRNA | mRNA | mRNA | mRNA |
| | | Level | Level | Level | Level | Level | Level |
| Treatment | Animal # | (Day −8) | (Day −8) | (Day 28) | (Day 28) | (Day 56) | (Day 56) |
| ETD02183 | 101 | 1.00 | 1.00 | 1.62 | 1.44 | 2.32 | 1.68 |
| | 102 | 1.00 | | 1.74 | | 1.75 | |
| | 103 | 1.00 | | 1.26 | | 1.60 | |
| | 104 | 1.00 | | 1.14 | | 1.03 | |
| ETD02189 | 201 | 1.00 | 1.00 | 0.37 | 0.35 | 0.82 | 0.74 |
| | 202 | 1.00 | | 0.37 | | 0.82 | |
| | 203 | 1.00 | | 0.33 | | 0.50 | |
| | 204 | 1.00 | | 0.34 | | 0.80 | |
| ETD02591 | 301 | 1.00 | 1.00 | 0.27 | 0.21 | 0.24 | 0.34 |
| | 302 | 1.00 | | 0.20 | | 0.31 | |
| | 303 | 1.00 | | 0.17 | | 0.44 | |
| | 304 | 1.00 | | 0.20 | | 0.38 | |
| ETD02373 | 401 | 1.00 | 1.00 | 0.43 | 0.63 | 0.70 | 0.87 |
| | 402 | 1.00 | | 0.81 | | 0.93 | |
| | 403 | 1.00 | | 0.71 | | 1.08 | |
| | 404 | 1.00 | | 0.58 | | 0.77 | |

### Example 48. Structure of 2′-O-Hexadecyl Adenylate

[chemical structure]

### Example 49: Determining the Activity of siRNAs Targeting MTRES1 in a Single Dose Study in Rats by Intrathecal Injection (KNG23-03)

[0663] The siRNA sequences are shown in Tables 95-96, where Nf is a 2′ fluoro-modified nucleoside, n is a 2′-O-methyl modified nucleoside, nm is a 2′-O-(2-methoxyethyl) modified nucleoside (MOE), “s” is a phosphorothioate linkage and 5VP is vinyl phosphonate at the 5′ end of antisense strand using 5′-POM-vinyl phosphonate, 2′-OMe-U CE-Phosphoramidite (Biosearch Technologies, 2579). Duplexes were formulated at 2.3 mg ml⁻¹ and 10 mg ml⁻¹ in 0.9% NaCl in water.

[0664] Animals were anesthetized by isoflurane to effect on Day 0 (dosing day), and then doses of test material were administered by intrathecal injection to the lumbar spine at the L4-L5 or L5-L6 intravertebral space. Syringes were loaded individually prior to each dose with 30 μL of dosing solution per animal. The test material at a dose volume of 30 μL/animal was delivered manually, using an insulin syringe with a 28-30-gauge needle. The tip of the needle was introduced into the lumbar spine, and proper insertion of the needle was confirmed by tail flick reflex. Test material was delivered manually over one to two seconds. After injecting the total dose volume, the needle was allowed to stay in place for a minimum of 5 seconds to avoid efflux of the test material to periphery. Animals were placed on a circulating water heating pad until fully recovered from anesthesia.

[0665] Rats were euthanized on Day 14 after injection and samples of liver, kidney, frontal cortex, hippocampus, temporal cortex, brain stem, cerebellum, and the spinal cord from each were collected, flash frozen in liquid nitrogen and stored at −80° C. until processing. Total RNA was prepared by homogenizing the tissue in homogenization buffer (Maxwell RSC simplyRNA Tissue Kit) using a Percellys 24 tissue homogenizer (Bertin Instruments) set at 5000 rpm for two 10 second cycles. Total RNA from the lysate was purified on a Maxwell RSC 48 platform (Promega Corporation) according to the manufacturer's recommendations. Preparation of cDNA was performed using Quanta qScript cDNA SuperMix (VWR, Catalog #95048-500) according to the manufacturer's instructions. The relative levels of MTRES1 mRNA were assessed by RT-qPCR in triplicate on a QuantStudio™ 6 Pro Real-Time PCR System using TaqMan assays for rat MTRES1 (ThermoFisher, assay #Rn01441122_m1) and the rat housekeeping gene PPIA (ThermoFisher, assay #Rn00630933_m1) and PerfeCTa® qPCR FastMix®, Low ROX™ (VWR, Catalog #101419-222). Data were normalized to the mean MTRES1 mRNA level in animals receiving vehicle (saline) control. Results are shown in Table 97 below.

[0666] Animal health checks were performed at least once daily to check for general health, mortality and moribundity. No treatment related observations were noted. There was no difference in body weight in treatment groups compared to the vehicle treated group and all animals body weight increased over the course of the study (not shown).

TABLE 95
Example siRNA Sequence

| | | Sense | Anti- | |
|---|---|---|---|---|
| | Sense | Strand | sense | |
| | Strand | Sequence | Strand | Antisense |
| | SEQ | (5′-3′) | SEQ | Strand |
| siRNA | ID | with | ID | Sequence |
| Name | NO: | moiety | NO: | (5′-3′) |
| ETD02275 | 3242 | [ETL20]gaa | 3248 | 5VPusAfsccg |
| | | gAfAfAfAfG | | UfuCfuGfcUf |
| | | fcagaacggu | | uUfuCfuUfcs |
| | | asusu | | usu |
| ETD02793 | 3296 | [ETL20]aag | 3337 | 5VPusCfsacC |
| | | amaAfAfGfC | | fgUfueUfgcu |
| | | fagaamcggu | | UfuUfcuusus |
| | | gasusu | | u |
| ETD03000 | 3317 | [ETL20]aag | 3337 | 5VPusCfsacCf |
| | | amaaAfGfCf | | gUfucUfgcuUf |
| | | Afgaamcggu | | uUfcuususu |
| | | gasusu | | |

TABLE 96
Example siRNA BASE Sequence

| | | | SEQ | Antisense |
|---|---|---|---|---|
| | SEQ | Sense Strand | ID | Strand Base |
| siRNA | ID | Base Sequence | | Sequence |
| Name | NO: | (5′ to 3′) | NO: | (5′ to 3′) |
| ETD02275 | 2683 | GAAGAAAAGCA | 2865 | UACCGUUCUGC |
| | | GAACGGUAUU | | UUUUCUUCUU |
| ETD02793 | 2684 | AAGAAAAGCA | 2866 | UCACCGUUCUG |
| | | GAACGGUGAUU | | CUUUUCUUUU |
| ETD03000 | 2684 | AAGAAAAGCA | 2866 | UCACCGUUCU |
| | | GAACGGUGAUU | | GCUUUUUUUU |

TABLE 97
Relative MTRES1 mRNA Levels in Rat Tissues

| | vehicle | ETD02275 | | ETD02793 | | ETD03000 | |
|---|---|---|---|---|---|---|---|
| | control | Dose | | Dose | | Dose | |
| | Relative | 70 μg | 300 μg | 70 μg | 300 μg | 70 μg | 300 μg |
| Tissue | mRNA | Relative mRNA | | Relative mRNA | | Relative mRNA | |
| Kidney | 1.00 | 0.87 | 0.69 | 0.84 | 0.77 | 0.89 | 0.68 |
| Liver | 1.00 | 1.30 | 0.92 | 1.10 | 1.12 | 1.05 | 1.06 |
| Lumbar Spinal Cord | 1.00 | 0.30 | 0.14 | 0.18 | 0.17 | 0.19 | 0.19 |
| Thoracic Spinal Cord | 1.00 | 0.35 | 0.17 | 0.22 | 0.17 | 0.25 | 0.17 |
| Cervical Spinal Cord | 1.00 | 0.61 | 0.25 | 0.29 | 0.26 | 0.27 | 0.20 |
| Cerebellum | 1.00 | 0.53 | 0.32 | 0.29 | 0.17 | 0.35 | 0.31 |
| Brain Stem | 1.00 | 0.50 | 0.23 | 0.30 | 0.20 | 0.24 | 0.17 |
| Temporal Cortex | 1.00 | 0.57 | 0.27 | 0.38 | 0.25 | 0.32 | 0.19 |
| Hippocampus | 1.00 | 0.77 | 0.39 | 0.36 | 0.31 | 0.27 | 0.27 |
| Frontal Cortex | 1.00 | 0.71 | 0.38 | 0.43 | 0.26 | 0.56 | 0.23 |

### Example 50: Determining the CNS Activity of siRNAs Targeting MTRES1 in a Single Dose Study in Intrathecally Catheterized Rats (EMPD-406)

[0667] The siRNA sequences are shown in Tables 98-99, where Nf is a 2′-fluoro-modified nucleoside, n is a 2′-O-methyl modified nucleoside, nm is a 2′-O-(2-methoxyethyl) modified nucleoside, “'s” is a phosphorothioate linkage and 5VP is vinyl phosphonate at the 5′ end of antisense strand using 5′-POM-vinyl phosphonate, 2′-OMe-U CE-Phosphoramidite (Biosearch Technologies, 2579). Duplexes formulated at 30 mg ml⁻¹ in artificial cerebrospinal fluid (aCSF) were administered as 30-μl IT injections in female Sprague Dawley rats (N=3-5/group) 250-300 g surgically implanted with an intrathecal catheter. siRNA was administered using a sterile Hamilton syringe and 23-gauge needle. Bolus injections of 30 μl were administered over a period of 10-15 seconds. Following injection, the catheter was flushed with 40 μl vehicle.

[0668] Rats were euthanized on Day 14 after injection and samples of liver, kidney, frontal cortex, hippocampus, brain stem, cerebellum, and the spinal cord from each were collected, flash frozen in liquid nitrogen and stored at −80° C. until processing. Total RNA was prepared by homogenizing the tissue in homogenization buffer (Maxwell RSC simplyRNA Tissue Kit) using a Percellys 24 tissue homogenizer (Bertin Instruments) set at 5000 rpm for two 10 second cycles. Total RNA from the lysate was purified on a Maxwell RSC 48 platform (Promega Corporation) according to the manufacturer's recommendations. Preparation of cDNA was performed using Quanta qScript cDNA SuperMix (VWR, Catalog #95048-500) according to the manufacturer's instructions. The relative levels of MTRES1 mRNA were assessed by RT-qPCR in triplicate on a QuantStudio™ 6 Pro Real-Time PCR System using TaqMan assays for rat MTRES1 (ThermoFisher, assay #Rn01441122_m1) and the rat housekeeping gene PPIA (ThermoFisher, assay #Rn00630933_m1) and PerfeCTa® qPCR FastMix®, Low ROX™ (VWR, Catalog #101419-222). Data were normalized to the mean MTRES1 mRNA level in animals receiving vehicle control. Results are shown in Table 100 below.

TABLE 98
Example siRNA Sequence

| | | Sense | Anti- | |
|---|---|---|---|---|
| | | Strand | sense | |
| | Sense | Sequence | Strand | Antisense |
| | Strand | (5′-3′) | SEQ | Strand |
| SIRNA | SEQ ID | with | ID | Sequence |
| Name | NO: | moiety | NO: | (5′-3′) |
| ETD02275 | 3242 | [ETL20]ga | 3248 | 5VPusAfsccg |
| | | agAfAfAfA | | UfuCfuGfcUf |
| | | fGfcagaac | | uUfuCfuUfcs |
| | | gguasusu | | usu |
| ETD03002 | 3339 | [ETL20]ga | 3340 | 5VPusAfsccG |
| | | agmaAfAfA | | fuUfcuGfcUf |
| | | fGfcagama | | uUfuCfuucsu |
| | | ccguasusu | | su |
| ETD02793 | 3296 | [ETL20]aa | 3337 | 5VPusCfsacC |
| | | gamaAfAfG | | fgUfucUfgcu |
| | | fCfagaamc | | UfuUfcuusus |
| | | ggugasusu | | u |
| ETD03000 | 3317 | [ETL20]aa | 3337 | 5VPusCfsacC |
| | | gamaaAfGf | | fgUfucUfgcu |
| | | CfAfgaamc | | UfuUfcuususu |
| | | ggugasusu | | |

TABLE 99
Example siRNA BASE Sequence

| | | | | Antisense |
|---|---|---|---|---|
| | | | | Strand |
| | SEQ | Sense Strand | SEQ | Base |
| SIRNA | ID | Base Sequence | ID | Sequence |
| Name | NO: | (5′ to 3′) | NO: | (5′ to 3′) |
| ETD02275 | 2683 | GAAGAAAAGCA | 2865 | UACCGUUCUG |
| | | GAACGGUAUU | | CUUUUCUUCU |
| | | | | U |
| ETD03002 | 2683 | GAAGAAAAGCA | 2865 | UACCGUUCUG |
| | | GAACGGUAUU | | CUUUUCUUCU |
| | | | | U |
| ETD02793 | 2684 | AAGAAAAGCAG | 2866 | UCACCGUUCU |
| | | AACGGUGAUU | | GCUUUUCUUU |
| | | | | U |
| ETD03000 | 2684 | AAGAAAAGCA | 2866 | UCACCGUUCU |
| | | GAACGGUGAU | | GCUUUUCUUU |
| | | U | | U |

TABLE 100
Relative MTRES1 mRNA Levels in Rat Tissues

| | vehicle control | | ETD02275 | | ETD03002 | | ETD02793 | | ETD03000 | |
|---|---|---|---|---|---|---|---|---|---|---|
| | Relative | | Relative | | Relative | | Relative | | Relative | |
| Tissue | mRNA | n | mRNA | n | mRNA | n | mRNA | n | mRNA | n |
| Kidney | 1.00 | 4 | 0.44 | 5 | 0.41 | 4 | 0.46 | 4 | 0.53 | 3 |
| Liver | 1.00 | 4 | 0.57 | 5 | 0.64 | 4 | 1.02 | 4 | 0.99 | 3 |
| Lumbar Spinal Cord | 1.00 | 4 | 0.11 | 5 | 0.14 | 4 | 0.24 | 4 | 0.24 | 3 |
| Thoracic Spinal Cord | 1.00 | 4 | 0.15 | 5 | 0.17 | 4 | 0.23 | 4 | 0.26 | 3 |
| Cervical Spinal Cord | 1.00 | 4 | 0.24 | 5 | 0.25 | 4 | 0.26 | 4 | 0.44 | 3 |
| Brain Stem | 1.00 | 4 | 0.32 | 5 | 0.37 | 4 | 0.19 | 4 | 0.21 | 3 |
| Cerebellum | 1.00 | 4 | 0.24 | 5 | 0.31 | 4 | 0.18 | 4 | 0.23 | 3 |
| Hippocampus | 1.00 | 4 | 0.33 | 5 | 0.34 | 4 | 0.23 | 4 | 0.34 | 3 |
| Frontal Cortex | 1.00 | 4 | 0.30 | 5 | 0.40 | 4 | 0.21 | 4 | 0.28 | 3 |

### Example 51: Modulation of MTRES1 in a Mouse Model for Alzheimer's Disease Using a siRNA that Modulates MTRES1

[0669] In this experiment, a mouse model of Alzheimer's Disease (AD) will be used to evaluate effects of the siRNAs described herein that target MTRES1. In some embodiments, the siRNA comprises one or more of SEQ ID NOS: 2675, 2677-2686, 2689, 2720, 2729, 2739, 2745, 2748, 2749, 2754, 2758-2762, 2766, 2767, 2769, 2770, 2786, 2787-2812, 2814-2816, 2819-2822, 2824, 2828-2833, 2836, 2838, 2839, 2857, 2859-2868, 2871, 2873, 2874, 2877-2879, 2940-2944, 2948-2952, 2968-2994, 2996-2998, 3001-3004, 3006, 3010, 3011, 3013-3015, 3018, and 3020. The model includes Tg2576 mice which express human amyloid beta precursor protein (APP) and presenilin-1 (PSEN1) transgenes with five AD-linked mutations. Cognitive function is measured using a forced swimming test (FST).

[0670] Seven-month-old mice are divided into two groups: Group 1-a group treated with the siRNA targeting MTRES1, Group 2-a group treated with vehicle.

[0671] Mice are administered the siRNA or the vehicle on day 0 of treatment. Every other week thereafter animals from each group will be dosed for a total of 4 injections. The behavioral tests are performed 24 hours after the final injection.

[0672] To rule out nonspecific motor effects that could influence the FST results, the potential effect of treatment on locomotor activity is assessed. Mice are evaluated using the openfield paradigm (44×44×40 cm) in a sound-attenuated room. The total distance (cm) traveled by each mouse is recorded for 5 min by a video surveillance system (SMART; Panlab SL, Barcelona, Spain) and is used to quantify activity levels. The floor of the open-field apparatus is cleaned with 10% ethanol between tests.

[0673] The FST includes a behavioral test useful for screening potential drugs that influence cognition and assessing other manipulations that are expected to affect cognitive related behaviors. On the first day, mice are placed individually in the water and allowed to swim for 15 min. The next day, mice are placed again in the water to observe the duration of immobility for 6 min using a camera. Following a 1-min session of acclimation to the apparatus, all behaviors are recorded for 5 min by a video surveillance system (SMART 2.5.21; Panlab SL). Immobility is defined as motionless floating in the water, only allowing movements necessary for the animal to keep its head above the water. The total immobility time in the FST is recorded as an index of cognitive ability.

[0674] Twenty four hours after the behavioral assessment, the mice are sacrificed by cervical dislocation following an intraperitoneal injection of 0.3 ml Nembutal (5 mg/ml) (Sigma Cat. No. 1507002). Brain and spinal cord tissues are removed and placed in RNAlater for mRNA isolation.

[0675] While preferred embodiments of the present invention have been shown and described herein, it will be obvious to those skilled in the art that such embodiments are provided by way of example only. Numerous variations, changes, and substitutions will now occur to those skilled in the art without departing from the invention. It should be understood that various alternatives to the embodiments of the invention described herein may be employed in practicing the invention. It is intended that the following claims define the scope of the invention and that methods and compositions within the scope of these claims and their equivalents be covered thereby.

### VI. SEQUENCE INFORMATION

[0676] Some embodiments include one or more nucleic acid sequences in the following tables:

TABLE 101
Sequence Information

| SEQ ID | |
|---|---|
| NO: | Description |
| 1-1140 | MTRES1 siRNA sense strand sequences |
| 1141-2280 | MTRES1 siRNA antisense strand sequences |
| 2281-2334 | Modified MTRES1 siRNA sense strand sequences |
| 2335-2388 | Modified MTRES1 siRNA antisense strand sequences |
| 2389-2442 | Alternatively modified MTRES1 siRNA sense strand |
| | sequences |
| 2443 | Full-length human MTRES1 mRNA sequence (Ensembl Acc. |
| | ENST00000311381.8) (human RNA) |
| 2444-2452 | Modification pattern 1S to 9S |
| 2453-2460 | Modification pattern 1AS to 8AS |
| 2461 | Modification pattern ASO1 |
| 2462 | Full-length human MTRES1 mRNA sequence (Ensembl Acc. |
| | ENST00000625458.1) (human RNA) |
| 2463-2466 | Example modified siRNA sense strand sequences |
| 2467-2470 | Example modified siRNA antisense strand sequences |
| 2471-2487 | Example modified siRNA sense strand sequences |
| 2488-2504 | Example modified siRNA antisense strand sequences |
| 2505-2514 | Example modified siRNA sense strand sequences |
| 2515-2524 | Example modified siRNA antisense strand sequences |
| 2525-2547 | Modification pattern 10S to 32S |
| 2549-2549 | Modification pattern 9AS to 10AS |
| 2550-2611 | Example siRNA sense strand sequences |
| 2612-2673 | Example siRNA antisense strand sequences |
| 2674-2855 | MTRES1 siRNA sense strand sequences |
| 2856-3037 | MTRES1 siRNA antisense strand sequences |
| 3038-3124 | Modified MTRES1 siRNA sense strand sequences |
| 3125-3212 | Modified MTRES1 siRNA antisense strand sequences |
| 3213-3226 | Modification pattern 33S-47S |
| 3227-3238 | Modification pattern 11AS-22AS |
| 3239 | Modified MTRES siRNA sense sequence |
| 3240 | Modification pattern 48S |
| 3241-3242 | Modified MTRES siRNA sense sequence |
| 3243-3250 | Modified MTRES siRNA antisense sequences |
| 3251-3253 | Modification patterns 49S-51S |
| 3254-3258 | Modification patterns 23AS-27AS |
| 3259-3260 | Modified MTRES siRNA sense sequences |
| 3261-3262 | Modified MTRES siRNA antisense sequences |
| 3263-3264 | MTRES1 siRNA sense strand sequences |
| 3265-3266 | MTRES1 siRNA antisense strand sequences |
| 3267-3273 | Modified MTRES siRNA sense sequences |
| 3274-3280 | Modified MTRES siRNA antisense sequences |
| 3291-3287 | MTRES1 siRNA sense strand sequences |
| 3288-3295 | MTRES1 siRNA antisense strand sequences |
| 3296-3299 | Modified MTRES siRNA sense sequences |
| 3300-3304 | Modified MTRES siRNA antisense sequences |

TABLE 102
Sequences

| | SEQ | sense strand | SEQ | antisense strand |
|---|---|---|---|---|
| siRNA | ID | sequence | ID | sequence |
| Name | NO: | (5′-3′) | NO: | (5′-3′) |
| siRNA 1 | 1 | GCGCAGAUAGGGGUAGCCU | 1141 | AGGCUACCCCUAUCUGCGC |
| siRNA 2 | 2 | CGCAGAUAGGGGUAGCCUG | 1142 | CAGGCUACCCCUAUCUGCG |
| siRNA 3 | 3 | GCAGAUAGGGGUAGCCUGG | 1143 | CCAGGCUACCCCUAUCUGC |

| | | | | |
|---|---|---|---|---|
| siRNA 4 | 4 | CAGAUAGGGGUAGCCUGGA | 1144 | UCCAGGCUACCCCUAUCUG |
| siRNA 5 | 5 | AGAUAGGGGUAGCCUGGAG | 1145 | CUCCAGGCUACCCCUAUCU |
| siRNA 6 | 6 | GAUAGGGGUAGCCUGGAGG | 1146 | CCUCCAGGCUACCCCUAUC |
| siRNA 7 | 7 | AUAGGGGUAGCCUGGAGGC | 1147 | GCCUCCAGGCUACCCCUAU |
| siRNA 8 | 8 | UAGGGGUAGCCUGGAGGCC | 1148 | GGCCUCCAGGCUACCCCUA |
| siRNA 9 | 9 | AGGGGUAGCCUGGAGGCCU | 1149 | AGGCCUCCAGGCUACCCCU |
| siRNA 10 | 10 | GGGGUAGCCUGGAGGCCUG | 1150 | CAGGCCUCCAGGCUACCCC |
| siRNA 11 | 11 | GGGUAGCCUGGAGGCCUGC | 1151 | GCAGGCCUCCAGGCUACCC |
| siRNA 12 | 12 | GGUAGCCUGGAGGCCUGCA | 1152 | UGCAGGCCUCCAGGCUACC |
| siRNA 13 | 13 | GUAGCCUGGAGGCCUGCAG | 1153 | CUGCAGGCCUCCAGGCUAC |
| siRNA 14 | 14 | UAGCCUGGAGGCCUGCAGU | 1154 | ACUGCAGGCCUCCAGGCUA |
| siRNA 15 | 15 | AGCCUGGAGGCCUGCAGUC | 1155 | GACUGCAGGCCUCCAGGCU |
| siRNA 16 | 16 | GCCUGGAGGCCUGCAGUCC | 1156 | GGACUGCAGGCCUCCAGGC |
| siRNA 17 | 17 | CCUGGAGGCCUGCAGUCCG | 1157 | CGGACUGCAGGCCUCCAGG |
| siRNA 18 | 18 | CUGGAGGCCUGCAGUCCGC | 1158 | GCGGACUGCAGGCCUCCAG |
| siRNA 19 | 19 | UGGAGGCCUGCAGUCCGCG | 1159 | CGCGGACUGCAGGCCUCCA |
| siRNA 20 | 20 | GGAGGCCUGCAGUCCGCGC | 1160 | GCGCGGACUGCAGGCCUCC |
| siRNA 21 | 21 | GAGGCCUGCAGUCCGCGCG | 1161 | CGCGCGGACUGCAGGCCUC |
| siRNA 22 | 22 | AGGCCUGCAGUCCGCGCGG | 1162 | CCGCGCGGACUGCAGGCCU |
| siRNA 23 | 23 | GGCCUGCAGUCCGCGCGGC | 1163 | GCCGCGCGGACUGCAGGCC |
| siRNA 24 | 24 | GCCUGCAGUCCGCGCGGCC | 1164 | GGCCGCGCGGACUGCAGGC |
| siRNA 25 | 25 | CCUGCAGUCCGCGCGGCCG | 1165 | CGGCCGCGCGGACUGCAGG |
| siRNA 26 | 26 | CUGCAGUCCGCGCGGCCGC | 1166 | GCGGCCGCGCGGACUGCAG |
| siRNA 27 | 27 | UGCAGUCCGCGCGGCCGCG | 1167 | CGCGGCCGCGCGGACUGCA |
| siRNA 28 | 28 | GCAGUCCGCGCGGCCGCGG | 1168 | CCGCGGCCGCGCGGACUGC |
| siRNA 29 | 29 | CAGUCCGCGCGGCCGCGGG | 1169 | CCCGCGGCCGCGCGGACUG |
| siRNA 30 | 30 | AGUCCGCGCGGCCGCGGGG | 1170 | CCCCGCGGCCGCGCGGACU |
| siRNA 31 | 31 | GUCCGCGCGGCCGCGGGGA | 1171 | UCCCCGCGGCCGCGCGGAC |
| siRNA 32 | 32 | UCCGCGCGGCCGCGGGGAG | 1172 | CUCCCCGCGGCCGCGCGGA |
| siRNA 33 | 33 | CCGCGCGGCCGCGGGGAGG | 1173 | CCUCCCCGCGGCCGCGCGG |
| siRNA 34 | 34 | CGCGCGGCCGCGGGGAGGG | 1174 | CCCUCCCCGCGGCCGCGCG |
| siRNA 35 | 35 | GCGCGGCCGCGGGGAGGGA | 1175 | UCCCUCCCCGCGGCCGCGC |
| siRNA 36 | 36 | CGCGGCCGCGGGGAGGGAC | 1176 | GUCCCUCCCCGCGGCCGCG |
| siRNA 37 | 37 | GCGGCCGCGGGGAGGGACG | 1177 | CGUCCCUCCCCGCGGCCGC |
| siRNA 38 | 38 | CGGCCGCGGGGAGGGACGA | 1178 | UCGUCCCUCCCCGCGGCCG |
| siRNA 39 | 39 | GGCCGCGGGGAGGGACGAG | 1179 | CUCGUCCCUCCCCGCGGCC |
| siRNA 40 | 40 | GCCGCGGGGAGGGACGAGA | 1180 | UCUCGUCCCUCCCCGCGGC |
| siRNA 41 | 41 | CCGCGGGGAGGGACGAGAG | 1181 | CUCUCGUCCCUCCCCGCGG |
| siRNA 42 | 42 | CGCGGGGAGGGACGAGAGG | 1182 | CCUCUCGUCCCUCCCCGCG |
| siRNA 43 | 43 | GCGGGGAGGGACGAGAGGG | 1183 | CCCUCUCGUCCCUCCCCGC |
| siRNA 44 | 44 | CGGGGAGGGACGAGAGGGC | 1184 | GCCCUCUCGUCCCUCCCCG |
| siRNA 45 | 45 | GGGGAGGGACGAGAGGGCC | 1185 | GGCCCUCUCGUCCCUCCCC |
| siRNA 46 | 46 | GGGAGGGACGAGAGGGCCU | 1186 | AGGCCCUCUCGUCCCUCCC |
| siRNA 47 | 47 | GGAGGGACGAGAGGGCCUG | 1187 | CAGGCCCUCUCGUCCCUCC |
| siRNA 48 | 48 | GAGGGACGAGAGGGCCUGA | 1188 | UCAGGCCCUCUCGUCCCUC |
| siRNA 49 | 49 | AGGGACGAGAGGGCCUGAC | 1189 | GUCAGGCCCUCUCGUCCCU |
| siRNA 50 | 50 | GGGACGAGAGGGCCUGACG | 1190 | CGUCAGGCCCUCUCGUCCC |
| siRNA 51 | 51 | GGACGAGAGGGCCUGACGU | 1191 | ACGUCAGGCCCUCUCGUCC |
| siRNA 52 | 52 | GACGAGAGGGCCUGACGUA | 1192 | UACGUCAGGCCCUCUCGUC |
| siRNA 53 | 53 | ACGAGAGGGCCUGACGUAC | 1193 | GUACGUCAGGCCCUCUCGU |
| siRNA 54 | 54 | CGAGAGGGCCUGACGUACA | 1194 | UGUACGUCAGGCCCUCUCG |
| SIRNA 55 | 55 | GAGAGGGCCUGACGUACAG | 1195 | CUGUACGUCAGGCCCUCUC |
| siRNA 56 | 56 | AGAGGGCCUGACGUACAGA | 1196 | UCUGUACGUCAGGCCCUCU |
| siRNA 57 | 57 | GAGGGCCUGACGUACAGAU | 1197 | AUCUGUACGUCAGGCCCUC |
| siRNA 58 | 58 | AGGGCCUGACGUACAGAUU | 1198 | AAUCUGUACGUCAGGCCCU |
| siRNA 59 | 59 | GGGCCUGACGUACAGAUUA | 1199 | UAAUCUGUACGUCAGGCCC |
| siRNA 60 | 60 | GGCCUGACGUACAGAUUAU | 1200 | AUAAUCUGUACGUCAGGCC |
| siRNA 61 | 61 | GCCUGACGUACAGAUUAUA | 1201 | UAUAAUCUGUACGUCAGGC |
| siRNA 62 | 62 | CCUGACGUACAGAUUAUAA | 1202 | UUAUAAUCUGUACGUCAGG |
| siRNA 63 | 63 | CUGACGUACAGAUUAUAAG | 1203 | CUUAUAAUCUGUACGUCAG |
| siRNA 64 | 64 | UGACGUACAGAUUAUAAGC | 1204 | GCUUAUAAUCUGUACGUCA |
| siRNA 65 | 65 | GACGUACAGAUUAUAAGCG | 1205 | CGCUUAUAAUCUGUACGUC |
| siRNA 66 | 66 | ACGUACAGAUUAUAAGCGC | 1206 | GCGCUUAUAAUCUGUACGU |
| siRNA 67 | 67 | CGUACAGAUUAUAAGCGCC | 1207 | GGCGCUUAUAAUCUGUACG |
| siRNA 68 | 68 | GUACAGAUUAUAAGCGCCA | 1208 | UGGCGCUUAUAAUCUGUAC |
| siRNA 69 | 69 | UACAGAUUAUAAGCGCCAU | 1209 | AUGGCGCUUAUAAUCUGUA |
| siRNA 70 | 70 | ACAGAUUAUAAGCGCCAUG | 1210 | CAUGGCGCUUAUAAUCUGU |
| siRNA 71 | 71 | CAGAUUAUAAGCGCCAUGG | 1211 | CCAUGGCGCUUAUAAUCUG |
| siRNA 72 | 72 | AGAUUAUAAGCGCCAUGGC | 1212 | GCCAUGGCGCUUAUAAUCU |
| siRNA 73 | 73 | GAUUAUAAGCGCCAUGGCU | 1213 | AGCCAUGGCGCUUAUAAUC |
| siRNA 74 | 74 | AUUAUAAGCGCCAUGGCUA | 1214 | UAGCCAUGGCGCUUAUAAU |
| siRNA 75 | 75 | UUAUAAGCGCCAUGGCUAU | 1215 | AUAGCCAUGGCGCUUAUAA |
| siRNA 76 | 76 | UAUAAGCGCCAUGGCUAUG | 1216 | CAUAGCCAUGGCGCUUAUA |
| siRNA 77 | 77 | AUAAGCGCCAUGGCUAUGG | 1217 | CCAUAGCCAUGGCGCUUAU |
| siRNA 78 | 78 | UAAGCGCCAUGGCUAUGGC | 1218 | GCCAUAGCCAUGGCGCUUA |
| siRNA 79 | 79 | AAGCGCCAUGGCUAUGGCU | 1219 | AGCCAUAGCCAUGGCGCUU |
| siRNA 80 | 80 | AGCGCCAUGGCUAUGGCUA | 1220 | UAGCCAUAGCCAUGGCGCU |
| siRNA 81 | 81 | GCGCCAUGGCUAUGGCUAG | 1221 | CUAGCCAUAGCCAUGGCGC |
| siRNA 82 | 82 | CGCCAUGGCUAUGGCUAGU | 1222 | ACUAGCCAUAGCCAUGGCG |
| siRNA 83 | 83 | GCCAUGGCUAUGGCUAGUG | 1223 | CACUAGCCAUAGCCAUGGC |
| siRNA 84 | 84 | CCAUGGCUAUGGCUAGUGU | 1224 | ACACUAGCCAUAGCCAUGG |
| siRNA 85 | 85 | CAUGGCUAUGGCUAGUGUU | 1225 | AACACUAGCCAUAGCCAUG |
| siRNA 86 | 86 | AUGGCUAUGGCUAGUGUUA | 1226 | UAACACUAGCCAUAGCCAU |
| siRNA 87 | 87 | UGGCUAUGGCUAGUGUUAA | 1227 | UUAACACUAGCCAUAGCCA |
| siRNA 88 | 88 | GGCUAUGGCUAGUGUUAAA | 1228 | UUUAACACUAGCCAUAGCC |
| siRNA 89 | 89 | GCUAUGGCUAGUGUUAAAU | 1229 | AUUUAACACUAGCCAUAGC |
| siRNA 90 | 90 | CUAUGGCUAGUGUUAAAUU | 1230 | AAUUUAACACUAGCCAUAG |
| siRNA 91 | 91 | UAUGGCUAGUGUUAAAUUG | 1231 | CAAUUUAACACUAGCCAUA |
| siRNA 92 | 92 | AUGGCUAGUGUUAAAUUGC | 1232 | GCAAUUUAACACUAGCCAU |
| siRNA 93 | 93 | UGGCUAGUGUUAAAUUGCU | 1233 | AGCAAUUUAACACUAGCCA |
| siRNA 94 | 94 | GGCUAGUGUUAAAUUGCUU | 1234 | AAGCAAUUUAACACUAGCC |
| siRNA 95 | 95 | GCUAGUGUUAAAUUGCUUG | 1235 | CAAGCAAUUUAACACUAGC |
| siRNA 96 | 96 | CUAGUGUUAAAUUGCUUGC | 1236 | GCAAGCAAUUUAACACUAG |
| siRNA 97 | 97 | UAGUGUUAAAUUGCUUGCC | 1237 | GGCAAGCAAUUUAACACUA |
| siRNA 98 | 98 | AGUGUUAAAUUGCUUGCCG | 1238 | CGGCAAGCAAUUUAACACU |
| siRNA 99 | 99 | GUGUUAAAUUGCUUGCCGG | 1239 | CCGGCAAGCAAUUUAACAC |
| siRNA 100 | 100 | UGUUAAAUUGCUUGCCGGU | 1240 | ACCGGCAAGCAAUUUAACA |
| siRNA 101 | 101 | GUUAAAUUGCUUGCCGGUG | 1241 | CACCGGCAAGCAAUUUAAC |
| siRNA 102 | 102 | UUAAAUUGCUUGCCGGUGU | 1242 | ACACCGGCAAGCAAUUUAA |
| siRNA 103 | 103 | UAAAUUGCUUGCCGGUGUU | 1243 | AACACCGGCAAGCAAUUUA |
| siRNA 104 | 104 | AAAUUGCUUGCCGGUGUUU | 1244 | AAACACCGGCAAGCAAUUU |
| siRNA 105 | 105 | AAUUGCUUGCCGGUGUUUU | 1245 | AAAACACCGGCAAGCAAUU |
| siRNA 106 | 106 | AUUGCUUGCCGGUGUUUUA | 1246 | UAAAACACCGGCAAGCAAU |
| siRNA 107 | 107 | UUGCUUGCCGGUGUUUUAA | 1247 | UUAAAACACCGGCAAGCAA |
| siRNA 108 | 108 | UGCUUGCCGGUGUUUUAAG | 1248 | CUUAAAACACCGGCAAGCA |
| siRNA 109 | 109 | GCUUGCCGGUGUUUUAAGA | 1249 | UCUUAAAACACCGGCAAGC |
| siRNA 110 | 110 | CUUGCCGGUGUUUUAAGAA | 1250 | UUCUUAAAACACCGGCAAG |
| siRNA 111 | 111 | UUGCCGGUGUUUUAAGAAA | 1251 | UUUCUUAAAACACCGGCAA |
| siRNA 112 | 112 | UGCCGGUGUUUUAAGAAAG | 1252 | CUUUCUUAAAACACCGGCA |
| siRNA 113 | 113 | GCCGGUGUUUUAAGAAAGC | 1253 | GCUUUCUUAAAACACCGGC |
| siRNA 114 | 114 | CCGGUGUUUUAAGAAAGCC | 1254 | GGCUUUCUUAAAACACCGG |
| SIRNA 115 | 115 | CGGUGUUUUAAGAAAGCCA | 1255 | UGGCUUUCUUAAAACACCG |
| siRNA 116 | 116 | GGUGUUUUAAGAAAGCCAG | 1256 | CUGGCUUUCUUAAAACACC |
| siRNA 117 | 117 | GUGUUUUAAGAAAGCCAGA | 1257 | UCUGGCUUUCUUAAAACAC |
| SIRNA 118 | 118 | UGUUUUAAGAAAGCCAGAU | 1258 | AUCUGGCUUUCUUAAAACA |
| siRNA 119 | 119 | GUUUUAAGAAAGCCAGAUG | 1259 | CAUCUGGCUUUCUUAAAAC |
| siRNA 120 | 120 | UUUUAAGAAAGCCAGAUGC | 1260 | GCAUCUGGCUUUCUUAAAA |
| siRNA 121 | 121 | UUUAAGAAAGCCAGAUGCC | 1261 | GGCAUCUGGCUUUCUUAAA |
| siRNA 122 | 122 | UUAAGAAAGCCAGAUGCCU | 1262 | AGGCAUCUGGCUUUCUUAA |
| siRNA 123 | 123 | UAAGAAAGCCAGAUGCCUG | 1263 | CAGGCAUCUGGCUUUCUUA |
| siRNA 124 | 124 | AAGAAAGCCAGAUGCCUGG | 1264 | CCAGGCAUCUGGCUUUCUU |
| siRNA 125 | 125 | AGAAAGCCAGAUGCCUGGA | 1265 | UCCAGGCAUCUGGCUUUCU |
| siRNA 126 | 126 | GAAAGCCAGAUGCCUGGAU | 1266 | AUCCAGGCAUCUGGCUUUC |
| siRNA 127 | 127 | AAAGCCAGAUGCCUGGAUU | 1267 | AAUCCAGGCAUCUGGCUUU |
| siRNA 128 | 128 | AAGCCAGAUGCCUGGAUUG | 1268 | CAAUCCAGGCAUCUGGCUU |
| siRNA 129 | 129 | AGCCAGAUGCCUGGAUUGG | 1269 | CCAAUCCAGGCAUCUGGCU |
| siRNA 130 | 130 | GCCAGAUGCCUGGAUUGGA | 1270 | UCCAAUCCAGGCAUCUGGC |
| siRNA 131 | 131 | CCAGAUGCCUGGAUUGGAC | 1271 | GUCCAAUCCAGGCAUCUGG |
| siRNA 132 | 132 | CAGAUGCCUGGAUUGGACU | 1272 | AGUCCAAUCCAGGCAUCUG |
| SIRNA 133 | 133 | AGAUGCCUGGAUUGGACUC | 1273 | GAGUCCAAUCCAGGCAUCU |
| siRNA 134 | 134 | GAUGCCUGGAUUGGACUCU | 1274 | AGAGUCCAAUCCAGGCAUC |
| siRNA 135 | 135 | AUGCCUGGAUUGGACUCUG | 1275 | CAGAGUCCAAUCCAGGCAU |
| siRNA 136 | 136 | UGCCUGGAUUGGACUCUGG | 1276 | CCAGAGUCCAAUCCAGGCA |
| SiRNA 137 | 137 | GCCUGGAUUGGACUCUGGG | 1277 | CCCAGAGUCCAAUCCAGGC |
| siRNA 138 | 138 | CCUGGAUUGGACUCUGGGG | 1278 | CCCCAGAGUCCAAUCCAGG |
| siRNA 139 | 139 | CUGGAUUGGACUCUGGGGU | 1279 | ACCCCAGAGUCCAAUCCAG |
| siRNA 140 | 140 | UGGAUUGGACUCUGGGGUG | 1280 | CACCCCAGAGUCCAAUCCA |
| siRNA 141 | 141 | GGAUUGGACUCUGGGGUGU | 1281 | ACACCCCAGAGUCCAAUCC |
| siRNA 142 | 142 | GAUUGGACUCUGGGGUGUU | 1282 | AACACCCCAGAGUCCAAUC |
| siRNA 143 | 143 | AUUGGACUCUGGGGUGUUC | 1283 | GAACACCCCAGAGUCCAAU |
| siRNA 144 | 144 | UUGGACUCUGGGGUGUUCU | 1284 | AGAACACCCCAGAGUCCAA |
| siRNA 145 | 145 | UGGACUCUGGGGUGUUCUC | 1285 | GAGAACACCCCAGAGUCCA |
| siRNA 146 | 146 | GGACUCUGGGGUGUUCUCC | 1286 | GGAGAACACCCCAGAGUCC |
| siRNA 147 | 147 | GACUCUGGGGUGUUCUCCG | 1287 | CGGAGAACACCCCAGAGUC |
| siRNA 148 | 148 | ACUCUGGGGUGUUCUCCGA | 1288 | UCGGAGAACACCCCAGAGU |
| siRNA 149 | 149 | CUCUGGGGUGUUCUCCGAG | 1289 | CUCGGAGAACACCCCAGAG |
| siRNA 150 | 150 | UCUGGGGUGUUCUCCGAGG | 1290 | CCUCGGAGAACACCCCAGA |
| siRNA 151 | 151 | CUGGGGUGUUCUCCGAGGG | 1291 | CCCUCGGAGAACACCCCAG |
| siRNA 152 | 152 | UGGGGUGUUCUCCGAGGGA | 1292 | UCCCUCGGAGAACACCCCA |
| siRNA 153 | 153 | GGGGUGUUCUCCGAGGGAC | 1293 | GUCCCUCGGAGAACACCCC |
| siRNA 154 | 154 | GGGUGUUCUCCGAGGGACA | 1294 | UGUCCCUCGGAGAACACCC |
| siRNA 155 | 155 | GGUGUUCUCCGAGGGACAC | 1295 | GUGUCCCUCGGAGAACACC |
| siRNA 156 | 156 | GUGUUCUCCGAGGGACACC | 1296 | GGUGUCCCUCGGAGAACAC |
| siRNA 157 | 157 | UGUUCUCCGAGGGACACCU | 1297 | AGGUGUCCCUCGGAGAACA |
| siRNA 158 | 158 | GUUCUCCGAGGGACACCUU | 1298 | AAGGUGUCCCUCGGAGAAC |
| siRNA 159 | 159 | UUCUCCGAGGGACACCUUC | 1299 | GAAGGUGUCCCUCGGAGAA |
| siRNA 160 | 160 | UCUCCGAGGGACACCUUCA | 1300 | UGAAGGUGUCCCUCGGAGA |
| siRNA 161 | 161 | CUCCGAGGGACACCUUCAU | 1301 | AUGAAGGUGUCCCUCGGAG |
| siRNA 162 | 162 | UCCGAGGGACACCUUCAUC | 1302 | GAUGAAGGUGUCCCUCGGA |
| siRNA 163 | 163 | CCGAGGGACACCUUCAUCA | 1303 | UGAUGAAGGUGUCCCUCGG |
| siRNA 164 | 164 | CGAGGGACACCUUCAUCAU | 1304 | AUGAUGAAGGUGUCCCUCG |
| siRNA 165 | 165 | GAGGGACACCUUCAUCAUA | 1305 | UAUGAUGAAGGUGUCCCUC |
| siRNA 166 | 166 | AGGGACACCUUCAUCAUAC | 1306 | GUAUGAUGAAGGUGUCCCU |
| siRNA 167 | 167 | GGGACACCUUCAUCAUACA | 1307 | UGUAUGAUGAAGGUGUCCC |
| siRNA 168 | 168 | GGACACCUUCAUCAUACAA | 1308 | UUGUAUGAUGAAGGUGUCC |
| siRNA 169 | 169 | GACACCUUCAUCAUACAAA | 1309 | UUUGUAUGAUGAAGGUGUC |
| siRNA 170 | 170 | ACACCUUCAUCAUACAAAC | 1310 | GUUUGUAUGAUGAAGGUGU |
| siRNA 171 | 171 | CACCUUCAUCAUACAAACU | 1311 | AGUUUGUAUGAUGAAGGUG |
| siRNA 172 | 172 | ACCUUCAUCAUACAAACUC | 1312 | GAGUUUGUAUGAUGAAGGU |
| siRNA 173 | 173 | CCUUCAUCAUACAAACUCU | 1313 | AGAGUUUGUAUGAUGAAGG |
| siRNA 174 | 174 | CUUCAUCAUACAAACUCUG | 1314 | CAGAGUUUGUAUGAUGAAG |
| siRNA 175 | 175 | UUCAUCAUACAAACUCUGU | 1315 | ACAGAGUUUGUAUGAUGAA |
| siRNA 176 | 176 | UCAUCAUACAAACUCUGUA | 1316 | UACAGAGUUUGUAUGAUGA |
| siRNA 177 | 177 | CAUCAUACAAACUCUGUAC | 1317 | GUACAGAGUUUGUAUGAUG |
| siRNA 178 | 178 | AUCAUACAAACUCUGUACU | 1318 | AGUACAGAGUUUGUAUGAU |
| siRNA 179 | 179 | UCAUACAAACUCUGUACUU | 1319 | AAGUACAGAGUUUGUAUGA |
| siRNA 180 | 180 | CAUACAAACUCUGUACUUC | 1320 | GAAGUACAGAGUUUGUAUG |
| siRNA 181 | 181 | AUACAAACUCUGUACUUCC | 1321 | GGAAGUACAGAGUUUGUAU |
| siRNA 182 | 182 | UACAAACUCUGUACUUCCU | 1322 | AGGAAGUACAGAGUUUGUA |
| siRNA 183 | 183 | ACAAACUCUGUACUUCCUG | 1323 | CAGGAAGUACAGAGUUUGU |
| siRNA 184 | 184 | CAAACUCUGUACUUCCUGG | 1324 | CCAGGAAGUACAGAGUUUG |
| siRNA 185 | 185 | AAACUCUGUACUUCCUGGA | 1325 | UCCAGGAAGUACAGAGUUU |
| siRNA 186 | 186 | AACUCUGUACUUCCUGGAA | 1326 | UUCCAGGAAGUACAGAGUU |
| siRNA 187 | 187 | ACUCUGUACUUCCUGGAAU | 1327 | AUUCCAGGAAGUACAGAGU |
| siRNA 188 | 188 | CUCUGUACUUCCUGGAAUC | 1328 | GAUUCCAGGAAGUACAGAG |
| siRNA 189 | 189 | UCUGUACUUCCUGGAAUCG | 1329 | CGAUUCCAGGAAGUACAGA |
| siRNA 190 | 190 | CUGUACUUCCUGGAAUCGA | 1330 | UCGAUUCCAGGAAGUACAG |
| siRNA 191 | 191 | UGUACUUCCUGGAAUCGAU | 1331 | AUCGAUUCCAGGAAGUACA |
| siRNA 192 | 192 | GUACUUCCUGGAAUCGAUA | 1332 | UAUCGAUUCCAGGAAGUAC |
| siRNA 193 | 193 | UACUUCCUGGAAUCGAUAC | 1333 | GUAUCGAUUCCAGGAAGUA |
| siRNA 194 | 194 | ACUUCCUGGAAUCGAUACU | 1334 | AGUAUCGAUUCCAGGAAGU |
| siRNA 195 | 195 | CUUCCUGGAAUCGAUACUU | 1335 | AAGUAUCGAUUCCAGGAAG |
| siRNA 196 | 196 | UUCCUGGAAUCGAUACUUG | 1336 | CAAGUAUCGAUUCCAGGAA |
| siRNA 197 | 197 | UCCUGGAAUCGAUACUUGU | 1337 | ACAAGUAUCGAUUCCAGGA |
| siRNA 198 | 198 | CCUGGAAUCGAUACUUGUA | 1338 | UACAAGUAUCGAUUCCAGG |
| siRNA 199 | 199 | CUGGAAUCGAUACUUGUAU | 1339 | AUACAAGUAUCGAUUCCAG |
| siRNA 200 | 200 | UGGAAUCGAUACUUGUAUU | 1340 | AAUACAAGUAUCGAUUCCA |
| siRNA 201 | 201 | GGAAUCGAUACUUGUAUUU | 1341 | AAAUACAAGUAUCGAUUCC |
| siRNA 202 | 202 | GAAUCGAUACUUGUAUUUU | 1342 | AAAAUACAAGUAUCGAUUC |
| siRNA 203 | 203 | AAUCGAUACUUGUAUUUUU | 1343 | AAAAAUACAAGUAUCGAUU |
| siRNA 204 | 204 | AUCGAUACUUGUAUUUUUC | 1344 | GAAAAAUACAAGUAUCGAU |
| siRNA 205 | 205 | UCGAUACUUGUAUUUUUCU | 1345 | AGAAAAAUACAAGUAUCGA |
| siRNA 206 | 206 | CGAUACUUGUAUUUUUCUA | 1346 | UAGAAAAAUACAAGUAUCG |
| siRNA 207 | 207 | GAUACUUGUAUUUUUCUAG | 1347 | CUAGAAAAAUACAAGUAUC |
| siRNA 208 | 208 | AUACUUGUAUUUUUCUAGU | 1348 | ACUAGAAAAAUACAAGUAU |
| siRNA 209 | 209 | UACUUGUAUUUUUCUAGUA | 1349 | UACUAGAAAAAUACAAGUA |
| siRNA 210 | 210 | ACUUGUAUUUUUCUAGUAC | 1350 | GUACUAGAAAAAUACAAGU |
| siRNA 211 | 211 | CUUGUAUUUUUCUAGUACC | 1351 | GGUACUAGAAAAAUACAAG |
| siRNA 212 | 212 | UUGUAUUUUUCUAGUACCA | 1352 | UGGUACUAGAAAAAUACAA |
| siRNA 213 | 213 | UGUAUUUUUCUAGUACCAA | 1353 | UUGGUACUAGAAAAAUACA |
| siRNA 214 | 214 | GUAUUUUUCUAGUACCAAG | 1354 | CUUGGUACUAGAAAAAUAC |
| siRNA 215 | 215 | UAUUUUUCUAGUACCAAGU | 1355 | ACUUGGUACUAGAAAAAUA |
| siRNA 216 | 216 | AUUUUUCUAGUACCAAGUU | 1356 | AACUUGGUACUAGAAAAAU |
| siRNA 217 | 217 | UUUUUCUAGUACCAAGUUA | 1357 | UAACUUGGUACUAGAAAAA |
| siRNA 218 | 218 | UUUUCUAGUACCAAGUUAC | 1358 | GUAACUUGGUACUAGAAAA |
| siRNA 219 | 219 | UUUCUAGUACCAAGUUACG | 1359 | CGUAACUUGGUACUAGAAA |
| siRNA 220 | 220 | UUCUAGUACCAAGUUACGU | 1360 | ACGUAACUUGGUACUAGAA |
| siRNA 221 | 221 | UCUAGUACCAAGUUACGUG | 1361 | CACGUAACUUGGUACUAGA |
| siRNA 222 | 222 | CUAGUACCAAGUUACGUGC | 1362 | GCACGUAACUUGGUACUAG |
| siRNA 223 | 223 | UAGUACCAAGUUACGUGCA | 1363 | UGCACGUAACUUGGUACUA |
| siRNA 224 | 224 | AGUACCAAGUUACGUGCAC | 1364 | GUGCACGUAACUUGGUACU |
| siRNA 225 | 225 | GUACCAAGUUACGUGCACC | 1365 | GGUGCACGUAACUUGGUAC |
| siRNA 226 | 226 | UACCAAGUUACGUGCACCA | 1366 | UGGUGCACGUAACUUGGUA |
| siRNA 227 | 227 | ACCAAGUUACGUGCACCAA | 1367 | UUGGUGCACGUAACUUGGU |
| siRNA 228 | 228 | CCAAGUUACGUGCACCAAA | 1368 | UUUGGUGCACGUAACUUGG |
| siRNA 229 | 229 | CAAGUUACGUGCACCAAAU | 1369 | AUUUGGUGCACGUAACUUG |
| siRNA 230 | 230 | AAGUUACGUGCACCAAAUU | 1370 | AAUUUGGUGCACGUAACUU |
| siRNA 231 | 231 | AGUUACGUGCACCAAAUUA | 1371 | UAAUUUGGUGCACGUAACU |
| siRNA 232 | 232 | GUUACGUGCACCAAAUUAU | 1372 | AUAAUUUGGUGCACGUAAC |
| siRNA 233 | 233 | UUACGUGCACCAAAUUAUA | 1373 | UAUAAUUUGGUGCACGUAA |
| siRNA 234 | 234 | UACGUGCACCAAAUUAUAA | 1374 | UUAUAAUUUGGUGCACGUA |
| siRNA 235 | 235 | ACGUGCACCAAAUUAUAAA | 1375 | UUUAUAAUUUGGUGCACGU |
| siRNA 236 | 236 | CGUGCACCAAAUUAUAAAA | 1376 | UUUUAUAAUUUGGUGCACG |
| siRNA 237 | 237 | GUGCACCAAAUUAUAAAAC | 1377 | GUUUUAUAAUUUGGUGCAC |
| siRNA 238 | 238 | UGCACCAAAUUAUAAAACA | 1378 | UGUUUUAUAAUUUGGUGCA |
| siRNA 239 | 239 | GCACCAAAUUAUAAAACAC | 1379 | GUGUUUUAUAAUUUGGUGC |
| siRNA 240 | 240 | CACCAAAUUAUAAAACACU | 1380 | AGUGUUUUAUAAUUUGGUG |
| siRNA 241 | 241 | ACCAAAUUAUAAAACACUU | 1381 | AAGUGUUUUAUAAUUUGGU |
| siRNA 242 | 242 | CCAAAUUAUAAAACACUUU | 1382 | AAAGUGUUUUAUAAUUUGG |
| siRNA 243 | 243 | CAAAUUAUAAAACACUUUU | 1383 | AAAAGUGUUUUAUAAUUUG |
| siRNA 244 | 244 | AAAUUAUAAAACACUUUUU | 1384 | AAAAAGUGUUUUAUAAUUU |
| siRNA 245 | 245 | AAUUAUAAAACACUUUUUU | 1385 | AAAAAAGUGUUUUAUAAUU |
| siRNA 246 | 246 | AUUAUAAAACACUUUUUUA | 1386 | UAAAAAAGUGUUUUAUAAU |
| siRNA 247 | 247 | UUAUAAAACACUUUUUUAU | 1387 | AUAAAAAAGUGUUUUAUAA |
| siRNA 248 | 248 | UAUAAAACACUUUUUUAUA | 1388 | UAUAAAAAAGUGUUUUAUA |
| siRNA 249 | 249 | AUAAAACACUUUUUUAUAA | 1389 | UUAUAAAAAAGUGUUUUAU |
| siRNA 250 | 250 | UAAAACACUUUUUUAUAAU | 1390 | AUUAUAAAAAAGUGUUUUA |
| siRNA 251 | 251 | AAAACACUUUUUUAUAAUA | 1391 | UAUUAUAAAAAAGUGUUUU |
| siRNA 252 | 252 | AAACACUUUUUUAUAAUAU | 1392 | AUAUUAUAAAAAAGUGUUU |
| siRNA 253 | 253 | AACACUUUUUUAUAAUAUU | 1393 | AAUAUUAUAAAAAAGUGUU |
| siRNA 254 | 254 | ACACUUUUUUAUAAUAUUU | 1394 | AAAUAUUAUAAAAAAGUGU |
| siRNA 255 | 255 | CACUUUUUUAUAAUAUUUU | 1395 | AAAAUAUUAUAAAAAAGUG |
| siRNA 256 | 256 | ACUUUUUUAUAAUAUUUUC | 1396 | GAAAAUAUUAUAAAAAAGU |
| siRNA 257 | 257 | CUUUUUUAUAAUAUUUUCU | 1397 | AGAAAAUAUUAUAAAAAAG |
| siRNA 258 | 258 | UUUUUUAUAAUAUUUUCUC | 1398 | GAGAAAAUAUUAUAAAAAA |
| siRNA 259 | 259 | UUUUUAUAAUAUUUUCUCA | 1399 | UGAGAAAAUAUUAUAAAAA |
| siRNA 260 | 260 | UUUUAUAAUAUUUUCUCAC | 1400 | GUGAGAAAAUAUUAUAAAA |
| siRNA 261 | 261 | UUUAUAAUAUUUUCUCACU | 1401 | AGUGAGAAAAUAUUAUAAA |
| siRNA 262 | 262 | UUAUAAUAUUUUCUCACUG | 1402 | CAGUGAGAAAAUAUUAUAA |
| siRNA 263 | 263 | UAUAAUAUUUUCUCACUGA | 1403 | UCAGUGAGAAAAUAUUAUA |
| siRNA 264 | 264 | AUAAUAUUUUCUCACUGAG | 1404 | CUCAGUGAGAAAAUAUUAU |
| siRNA 265 | 265 | UAAUAUUUUCUCACUGAGA | 1405 | UCUCAGUGAGAAAAUAUUA |
| siRNA 266 | 266 | AAUAUUUUCUCACUGAGAC | 1406 | GUCUCAGUGAGAAAAUAUU |
| siRNA 267 | 267 | AUAUUUUCUCACUGAGACU | 1407 | AGUCUCAGUGAGAAAAUAU |
| siRNA 268 | 268 | UAUUUUCUCACUGAGACUC | 1408 | GAGUCUCAGUGAGAAAAUA |
| siRNA 269 | 269 | AUUUUCUCACUGAGACUCC | 1409 | GGAGUCUCAGUGAGAAAAU |
| siRNA 270 | 270 | UUUUCUCACUGAGACUCCC | 1410 | GGGAGUCUCAGUGAGAAAA |
| siRNA 271 | 271 | UUUCUCACUGAGACUCCCA | 1411 | UGGGAGUCUCAGUGAGAAA |
| siRNA 272 | 272 | UUCUCACUGAGACUCCCAG | 1412 | CUGGGAGUCUCAGUGAGAA |
| siRNA 273 | 273 | UCUCACUGAGACUCCCAGG | 1413 | CCUGGGAGUCUCAGUGAGA |
| siRNA 274 | 274 | CUCACUGAGACUCCCAGGG | 1414 | CCCUGGGAGUCUCAGUGAG |
| siRNA 275 | 275 | UCACUGAGACUCCCAGGGC | 1415 | GCCCUGGGAGUCUCAGUGA |
| siRNA 276 | 276 | CACUGAGACUCCCAGGGCU | 1416 | AGCCCUGGGAGUCUCAGUG |
| siRNA 277 | 277 | ACUGAGACUCCCAGGGCUU | 1417 | AAGCCCUGGGAGUCUCAGU |
| siRNA 278 | 278 | CUGAGACUCCCAGGGCUUU | 1418 | AAAGCCCUGGGAGUCUCAG |
| siRNA 279 | 279 | UGAGACUCCCAGGGCUUUU | 1419 | AAAAGCCCUGGGAGUCUCA |
| siRNA 280 | 280 | GAGACUCCCAGGGCUUUUA | 1420 | UAAAAGCCCUGGGAGUCUC |
| siRNA 281 | 281 | AGACUCCCAGGGCUUUUAC | 1421 | GUAAAAGCCCUGGGAGUCU |
| siRNA 282 | 282 | GACUCCCAGGGCUUUUACU | 1422 | AGUAAAAGCCCUGGGAGUC |
| siRNA 283 | 283 | ACUCCCAGGGCUUUUACUA | 1423 | UAGUAAAAGCCCUGGGAGU |
| siRNA 284 | 284 | CUCCCAGGGCUUUUACUAU | 1424 | AUAGUAAAAGCCCUGGGAG |
| siRNA 285 | 285 | UCCCAGGGCUUUUACUAUC | 1425 | GAUAGUAAAAGCCCUGGGA |
| siRNA 286 | 286 | CCCAGGGCUUUUACUAUCU | 1426 | AGAUAGUAAAAGCCCUGGG |
| siRNA 287 | 287 | CCAGGGCUUUUACUAUCUC | 1427 | GAGAUAGUAAAAGCCCUGG |
| siRNA 288 | 288 | CAGGGCUUUUACUAUCUCC | 1428 | GGAGAUAGUAAAAGCCCUG |
| siRNA 289 | 289 | AGGGCUUUUACUAUCUCCA | 1429 | UGGAGAUAGUAAAAGCCCU |
| siRNA 290 | 290 | GGGCUUUUACUAUCUCCAG | 1430 | CUGGAGAUAGUAAAAGCCC |
| siRNA 291 | 291 | GGCUUUUACUAUCUCCAGA | 1431 | UCUGGAGAUAGUAAAAGCC |
| siRNA 292 | 292 | GCUUUUACUAUCUCCAGAA | 1432 | UUCUGGAGAUAGUAAAAGC |
| siRNA 293 | 293 | CUUUUACUAUCUCCAGAAU | 1433 | AUUCUGGAGAUAGUAAAAG |
| siRNA 294 | 294 | UUUUACUAUCUCCAGAAUG | 1434 | CAUUCUGGAGAUAGUAAAA |
| siRNA 295 | 295 | UUUACUAUCUCCAGAAUGU | 1435 | ACAUUCUGGAGAUAGUAAA |
| siRNA 296 | 296 | UUACUAUCUCCAGAAUGUA | 1436 | UACAUUCUGGAGAUAGUAA |
| siRNA 297 | 297 | UACUAUCUCCAGAAUGUAU | 1437 | AUACAUUCUGGAGAUAGUA |
| siRNA 298 | 298 | ACUAUCUCCAGAAUGUAUU | 1438 | AAUACAUUCUGGAGAUAGU |
| siRNA 299 | 299 | CUAUCUCCAGAAUGUAUUU | 1439 | AAAUACAUUCUGGAGAUAG |
| siRNA 300 | 300 | UAUCUCCAGAAUGUAUUUU | 1440 | AAAAUACAUUCUGGAGAUA |
| siRNA 301 | 301 | AUCUCCAGAAUGUAUUUUU | 1441 | AAAAAUACAUUCUGGAGAU |
| siRNA 302 | 302 | UCUCCAGAAUGUAUUUUUC | 1442 | GAAAAAUACAUUCUGGAGA |
| siRNA 303 | 303 | CUCCAGAAUGUAUUUUUCC | 1443 | GGAAAAAUACAUUCUGGAG |
| siRNA 304 | 304 | UCCAGAAUGUAUUUUUCCU | 1444 | AGGAAAAAUACAUUCUGGA |
| siRNA 305 | 305 | CCAGAAUGUAUUUUUCCUU | 1445 | AAGGAAAAAUACAUUCUGG |
| siRNA 306 | 306 | CAGAAUGUAUUUUUCCUUU | 1446 | AAAGGAAAAAUACAUUCUG |
| siRNA 307 | 307 | AGAAUGUAUUUUUCCUUUU | 1447 | AAAAGGAAAAAUACAUUCU |
| siRNA 308 | 308 | GAAUGUAUUUUUCCUUUUU | 1448 | AAAAAGGAAAAAUACAUUC |
| siRNA 309 | 309 | AAUGUAUUUUUCCUUUUUC | 1449 | GAAAAAGGAAAAAUACAUU |
| siRNA 310 | 310 | AUGUAUUUUUCCUUUUUCC | 1450 | GGAAAAAGGAAAAAUACAU |
| siRNA 311 | 311 | UGUAUUUUUCCUUUUUCCG | 1451 | CGGAAAAAGGAAAAAUACA |
| siRNA 312 | 312 | GUAUUUUUCCUUUUUCCGU | 1452 | ACGGAAAAAGGAAAAAUAC |
| siRNA 313 | 313 | UAUUUUUCCUUUUUCCGUA | 1453 | UACGGAAAAAGGAAAAAUA |
| siRNA 314 | 314 | AUUUUUCCUUUUUCCGUAA | 1454 | UUACGGAAAAAGGAAAAAU |
| siRNA 315 | 315 | UUUUUCCUUUUUCCGUAAG | 1455 | CUUACGGAAAAAGGAAAAA |
| siRNA 316 | 316 | UUUUCCUUUUUCCGUAAGA | 1456 | UCUUACGGAAAAAGGAAAA |
| siRNA 317 | 317 | UUUCCUUUUUCCGUAAGAC | 1457 | GUCUUACGGAAAAAGGAAA |
| siRNA 318 | 318 | UUCCUUUUUCCGUAAGACU | 1458 | AGUCUUACGGAAAAAGGAA |
| siRNA 319 | 319 | UCCUUUUUCCGUAAGACUC | 1459 | GAGUCUUACGGAAAAAGGA |
| siRNA 320 | 320 | CCUUUUUCCGUAAGACUCA | 1460 | UGAGUCUUACGGAAAAAGG |
| siRNA 321 | 321 | CUUUUUCCGUAAGACUCAA | 1461 | UUGAGUCUUACGGAAAAAG |
| siRNA 322 | 322 | UUUUUCCGUAAGACUCAAA | 1462 | UUUGAGUCUUACGGAAAAA |
| siRNA 323 | 323 | UUUUCCGUAAGACUCAAAA | 1463 | UUUUGAGUCUUACGGAAAA |
| siRNA 324 | 324 | UUUCCGUAAGACUCAAAAG | 1464 | CUUUUGAGUCUUACGGAAA |
| siRNA 325 | 325 | UUCCGUAAGACUCAAAAGU | 1465 | ACUUUUGAGUCUUACGGAA |
| siRNA 326 | 326 | UCCGUAAGACUCAAAAGUA | 1466 | UACUUUUGAGUCUUACGGA |
| siRNA 327 | 327 | CCGUAAGACUCAAAAGUAA | 1467 | UUACUUUUGAGUCUUACGG |
| siRNA 328 | 328 | CGUAAGACUCAAAAGUAAU | 1468 | AUUACUUUUGAGUCUUACG |
| siRNA 329 | 329 | GUAAGACUCAAAAGUAAUA | 1469 | UAUUACUUUUGAGUCUUAC |
| siRNA 330 | 330 | UAAGACUCAAAAGUAAUAU | 1470 | AUAUUACUUUUGAGUCUUA |
| siRNA 331 | 331 | AAGACUCAAAAGUAAUAUA | 1471 | UAUAUUACUUUUGAGUCUU |
| siRNA 332 | 332 | AGACUCAAAAGUAAUAUAA | 1472 | UUAUAUUACUUUUGAGUCU |
| siRNA 333 | 333 | GACUCAAAAGUAAUAUAAG | 1473 | CUUAUAUUACUUUUGAGUC |
| siRNA 334 | 334 | ACUCAAAAGUAAUAUAAGG | 1474 | CCUUAUAUUACUUUUGAGU |
| siRNA 335 | 335 | CUCAAAAGUAAUAUAAGGU | 1475 | ACCUUAUAUUACUUUUGAG |
| siRNA 336 | 336 | UCAAAAGUAAUAUAAGGUC | 1476 | GACCUUAUAUUACUUUUGA |
| siRNA 337 | 337 | CAAAAGUAAUAUAAGGUCU | 1477 | AGACCUUAUAUUACUUUUG |
| siRNA 338 | 338 | AAAAGUAAUAUAAGGUCUA | 1478 | UAGACCUUAUAUUACUUUU |
| siRNA 339 | 339 | AAAGUAAUAUAAGGUCUAC | 1479 | GUAGACCUUAUAUUACUUU |
| siRNA 340 | 340 | AAGUAAUAUAAGGUCUACA | 1480 | UGUAGACCUUAUAUUACUU |
| siRNA 341 | 341 | AGUAAUAUAAGGUCUACAA | 1481 | UUGUAGACCUUAUAUUACU |
| siRNA 342 | 342 | GUAAUAUAAGGUCUACAAA | 1482 | UUUGUAGACCUUAUAUUAC |
| siRNA 343 | 343 | UAAUAUAAGGUCUACAAAA | 1483 | UUUUGUAGACCUUAUAUUA |
| siRNA 344 | 344 | AAUAUAAGGUCUACAAAAU | 1484 | AUUUUGUAGACCUUAUAUU |
| siRNA 345 | 345 | AUAUAAGGUCUACAAAAUC | 1485 | GAUUUUGUAGACCUUAUAU |
| siRNA 346 | 346 | UAUAAGGUCUACAAAAUCU | 1486 | AGAUUUUGUAGACCUUAUA |
| siRNA 347 | 347 | AUAAGGUCUACAAAAUCUA | 1487 | UAGAUUUUGUAGACCUUAU |
| siRNA 348 | 348 | UAAGGUCUACAAAAUCUAC | 1488 | GUAGAUUUUGUAGACCUUA |
| siRNA 349 | 349 | AAGGUCUACAAAAUCUACU | 1489 | AGUAGAUUUUGUAGACCUU |
| siRNA 350 | 350 | AGGUCUACAAAAUCUACUA | 1490 | UAGUAGAUUUUGUAGACCU |
| siRNA 351 | 351 | GGUCUACAAAAUCUACUAA | 1491 | UUAGUAGAUUUUGUAGACC |
| siRNA 352 | 352 | GUCUACAAAAUCUACUAAA | 1492 | UUUAGUAGAUUUUGUAGAC |
| siRNA 353 | 353 | UCUACAAAAUCUACUAAAA | 1493 | UUUUAGUAGAUUUUGUAGA |
| siRNA 354 | 354 | CUACAAAAUCUACUAAAAA | 1494 | UUUUUAGUAGAUUUUGUAG |
| siRNA 355 | 355 | UACAAAAUCUACUAAAAAG | 1495 | CUUUUUAGUAGAUUUUGUA |
| siRNA 356 | 356 | ACAAAAUCUACUAAAAAGU | 1496 | ACUUUUUAGUAGAUUUUGU |
| siRNA 357 | 357 | CAAAAUCUACUAAAAAGUC | 1497 | GACUUUUUAGUAGAUUUUG |
| siRNA 358 | 358 | AAAAUCUACUAAAAAGUCU | 1498 | AGACUUUUUAGUAGAUUUU |
| siRNA 359 | 359 | AAAUCUACUAAAAAGUCUC | 1499 | GAGACUUUUUAGUAGAUUU |
| siRNA 360 | 360 | AAUCUACUAAAAAGUCUCU | 1500 | AGAGACUUUUUAGUAGAUU |
| siRNA 361 | 361 | AUCUACUAAAAAGUCUCUG | 1501 | CAGAGACUUUUUAGUAGAU |
| siRNA 362 | 362 | UCUACUAAAAAGUCUCUGC | 1502 | GCAGAGACUUUUUAGUAGA |
| siRNA 363 | 363 | CUACUAAAAAGUCUCUGCA | 1503 | UGCAGAGACUUUUUAGUAG |
| siRNA 364 | 364 | UACUAAAAAGUCUCUGCAA | 1504 | UUGCAGAGACUUUUUAGUA |
| siRNA 365 | 365 | ACUAAAAAGUCUCUGCAAA | 1505 | UUUGCAGAGACUUUUUAGU |
| siRNA 366 | 366 | CUAAAAAGUCUCUGCAAAA | 1506 | UUUUGCAGAGACUUUUUAG |
| siRNA 367 | 367 | UAAAAAGUCUCUGCAAAAA | 1507 | UUUUUGCAGAGACUUUUUA |
| siRNA 368 | 368 | AAAAAGUCUCUGCAAAAAG | 1508 | CUUUUUGCAGAGACUUUUU |
| siRNA 369 | 369 | AAAAGUCUCUGCAAAAAGU | 1509 | ACUUUUUGCAGAGACUUUU |
| siRNA 370 | 370 | AAAGUCUCUGCAAAAAGUA | 1510 | UACUUUUUGCAGAGACUUU |
| siRNA 371 | 371 | AAGUCUCUGCAAAAAGUAG | 1511 | CUACUUUUUGCAGAGACUU |
| siRNA 372 | 372 | AGUCUCUGCAAAAAGUAGA | 1512 | UCUACUUUUUGCAGAGACU |
| siRNA 373 | 373 | GUCUCUGCAAAAAGUAGAU | 1513 | AUCUACUUUUUGCAGAGAC |
| siRNA 374 | 374 | UCUCUGCAAAAAGUAGAUG | 1514 | CAUCUACUUUUUGCAGAGA |
| siRNA 375 | 375 | CUCUGCAAAAAGUAGAUGA | 1515 | UCAUCUACUUUUUGCAGAG |
| siRNA 376 | 376 | UCUGCAAAAAGUAGAUGAA | 1516 | UUCAUCUACUUUUUGCAGA |
| siRNA 377 | 377 | CUGCAAAAAGUAGAUGAAG | 1517 | CUUCAUCUACUUUUUGCAG |
| siRNA 378 | 378 | UGCAAAAAGUAGAUGAAGA | 1518 | UCUUCAUCUACUUUUUGCA |
| siRNA 379 | 379 | GCAAAAAGUAGAUGAAGAG | 1519 | CUCUUCAUCUACUUUUUGC |
| siRNA 380 | 380 | CAAAAAGUAGAUGAAGAGG | 1520 | CCUCUUCAUCUACUUUUUG |
| siRNA 381 | 381 | AAAAAGUAGAUGAAGAGGA | 1521 | UCCUCUUCAUCUACUUUUU |
| siRNA 382 | 382 | AAAAGUAGAUGAAGAGGAC | 1522 | GUCCUCUUCAUCUACUUUU |
| SIRNA 383 | 383 | AAAGUAGAUGAAGAGGACU | 1523 | AGUCCUCUUCAUCUACUUU |
| siRNA 384 | 384 | AAGUAGAUGAAGAGGACUC | 1524 | GAGUCCUCUUCAUCUACUU |
| siRNA 385 | 385 | AGUAGAUGAAGAGGACUCU | 1525 | AGAGUCCUCUUCAUCUACU |
| siRNA 386 | 386 | GUAGAUGAAGAGGACUCUG | 1526 | CAGAGUCCUCUUCAUCUAC |
| siRNA 387 | 387 | UAGAUGAAGAGGACUCUGA | 1527 | UCAGAGUCCUCUUCAUCUA |
| siRNA 388 | 388 | AGAUGAAGAGGACUCUGAU | 1528 | AUCAGAGUCCUCUUCAUCU |
| siRNA 389 | 389 | GAUGAAGAGGACUCUGAUG | 1529 | CAUCAGAGUCCUCUUCAUC |
| siRNA 390 | 390 | AUGAAGAGGACUCUGAUGA | 1530 | UCAUCAGAGUCCUCUUCAU |
| siRNA 391 | 391 | UGAAGAGGACUCUGAUGAA | 1531 | UUCAUCAGAGUCCUCUUCA |
| siRNA 392 | 392 | GAAGAGGACUCUGAUGAAG | 1532 | CUUCAUCAGAGUCCUCUUC |
| siRNA 393 | 393 | AAGAGGACUCUGAUGAAGA | 1533 | UCUUCAUCAGAGUCCUCUU |
| siRNA 394 | 394 | AGAGGACUCUGAUGAAGAA | 1534 | UUCUUCAUCAGAGUCCUCU |
| siRNA 395 | 395 | GAGGACUCUGAUGAAGAAA | 1535 | UUUCUUCAUCAGAGUCCUC |
| siRNA 396 | 396 | AGGACUCUGAUGAAGAAAG | 1536 | CUUUCUUCAUCAGAGUCCU |
| siRNA 397 | 397 | GGACUCUGAUGAAGAAAGC | 1537 | GCUUUCUUCAUCAGAGUCC |
| siRNA 398 | 398 | GACUCUGAUGAAGAAAGCC | 1538 | GGCUUUCUUCAUCAGAGUC |
| siRNA 399 | 399 | ACUCUGAUGAAGAAAGCCA | 1539 | UGGCUUUCUUCAUCAGAGU |
| siRNA 400 | 400 | CUCUGAUGAAGAAAGCCAU | 1540 | AUGGCUUUCUUCAUCAGAG |
| siRNA 401 | 401 | UCUGAUGAAGAAAGCCAUC | 1541 | GAUGGCUUUCUUCAUCAGA |
| siRNA 402 | 402 | CUGAUGAAGAAAGCCAUCA | 1542 | UGAUGGCUUUCUUCAUCAG |
| siRNA 403 | 403 | UGAUGAAGAAAGCCAUCAU | 1543 | AUGAUGGCUUUCUUCAUCA |
| siRNA 404 | 404 | GAUGAAGAAAGCCAUCAUG | 1544 | CAUGAUGGCUUUCUUCAUC |
| siRNA 405 | 405 | AUGAAGAAAGCCAUCAUGA | 1545 | UCAUGAUGGCUUUCUUCAU |
| siRNA 406 | 406 | UGAAGAAAGCCAUCAUGAU | 1546 | AUCAUGAUGGCUUUCUUCA |
| siRNA 407 | 407 | GAAGAAAGCCAUCAUGAUG | 1547 | CAUCAUGAUGGCUUUCUUC |
| siRNA 408 | 408 | AAGAAAGCCAUCAUGAUGA | 1548 | UCAUCAUGAUGGCUUUCUU |
| siRNA 409 | 409 | AGAAAGCCAUCAUGAUGAG | 1549 | CUCAUCAUGAUGGCUUUCU |
| siRNA 410 | 410 | GAAAGCCAUCAUGAUGAGA | 1550 | UCUCAUCAUGAUGGCUUUC |
| siRNA 411 | 411 | AAAGCCAUCAUGAUGAGAU | 1551 | AUCUCAUCAUGAUGGCUUU |
| siRNA 412 | 412 | AAGCCAUCAUGAUGAGAUG | 1552 | CAUCUCAUCAUGAUGGCUU |
| siRNA 413 | 413 | AGCCAUCAUGAUGAGAUGA | 1553 | UCAUCUCAUCAUGAUGGCU |
| siRNA 414 | 414 | GCCAUCAUGAUGAGAUGAG | 1554 | CUCAUCUCAUCAUGAUGGC |
| siRNA 415 | 415 | CCAUCAUGAUGAGAUGAGU | 1555 | ACUCAUCUCAUCAUGAUGG |
| SIRNA 416 | 416 | CAUCAUGAUGAGAUGAGUG | 1556 | CACUCAUCUCAUCAUGAUG |
| siRNA 417 | 417 | AUCAUGAUGAGAUGAGUGA | 1557 | UCACUCAUCUCAUCAUGAU |
| siRNA 418 | 418 | UCAUGAUGAGAUGAGUGAG | 1558 | CUCACUCAUCUCAUCAUGA |
| siRNA 419 | 419 | CAUGAUGAGAUGAGUGAGC | 1559 | GCUCACUCAUCUCAUCAUG |
| siRNA 420 | 420 | AUGAUGAGAUGAGUGAGCA | 1560 | UGCUCACUCAUCUCAUCAU |
| siRNA 421 | 421 | UGAUGAGAUGAGUGAGCAG | 1561 | CUGCUCACUCAUCUCAUCA |
| siRNA 422 | 422 | GAUGAGAUGAGUGAGCAGG | 1562 | CCUGCUCACUCAUCUCAUC |
| siRNA 423 | 423 | AUGAGAUGAGUGAGCAGGA | 1563 | UCCUGCUCACUCAUCUCAU |
| siRNA 424 | 424 | UGAGAUGAGUGAGCAGGAA | 1564 | UUCCUGCUCACUCAUCUCA |
| siRNA 425 | 425 | GAGAUGAGUGAGCAGGAAG | 1565 | CUUCCUGCUCACUCAUCUC |
| siRNA 426 | 426 | AGAUGAGUGAGCAGGAAGA | 1566 | UCUUCCUGCUCACUCAUCU |
| siRNA 427 | 427 | GAUGAGUGAGCAGGAAGAG | 1567 | CUCUUCCUGCUCACUCAUC |
| siRNA 428 | 428 | AUGAGUGAGCAGGAAGAGG | 1568 | CCUCUUCCUGCUCACUCAU |
| siRNA 429 | 429 | UGAGUGAGCAGGAAGAGGA | 1569 | UCCUCUUCCUGCUCACUCA |
| siRNA 430 | 430 | GAGUGAGCAGGAAGAGGAG | 1570 | CUCCUCUUCCUGCUCACUC |
| siRNA 431 | 431 | AGUGAGCAGGAAGAGGAGC | 1571 | GCUCCUCUUCCUGCUCACU |
| siRNA 432 | 432 | GUGAGCAGGAAGAGGAGCU | 1572 | AGCUCCUCUUCCUGCUCAC |
| siRNA 433 | 433 | UGAGCAGGAAGAGGAGCUU | 1573 | AAGCUCCUCUUCCUGCUCA |
| siRNA 434 | 434 | GAGCAGGAAGAGGAGCUUG | 1574 | CAAGCUCCUCUUCCUGCUC |
| siRNA 435 | 435 | AGCAGGAAGAGGAGCUUGA | 1575 | UCAAGCUCCUCUUCCUGCU |
| siRNA 436 | 436 | GCAGGAAGAGGAGCUUGAG | 1576 | CUCAAGCUCCUCUUCCUGC |
| siRNA 437 | 437 | CAGGAAGAGGAGCUUGAGG | 1577 | CCUCAAGCUCCUCUUCCUG |
| siRNA 438 | 438 | AGGAAGAGGAGCUUGAGGA | 1578 | UCCUCAAGCUCCUCUUCCU |
| siRNA 439 | 439 | GGAAGAGGAGCUUGAGGAU | 1579 | AUCCUCAAGCUCCUCUUCC |
| siRNA 440 | 440 | GAAGAGGAGCUUGAGGAUG | 1580 | CAUCCUCAAGCUCCUCUUC |
| siRNA 441 | 441 | AAGAGGAGCUUGAGGAUGA | 1581 | UCAUCCUCAAGCUCCUCUU |
| siRNA 442 | 442 | AGAGGAGCUUGAGGAUGAU | 1582 | AUCAUCCUCAAGCUCCUCU |
| siRNA 443 | 443 | GAGGAGCUUGAGGAUGAUC | 1583 | GAUCAUCCUCAAGCUCCUC |
| siRNA 444 | 444 | AGGAGCUUGAGGAUGAUCC | 1584 | GGAUCAUCCUCAAGCUCCU |
| siRNA 445 | 445 | GGAGCUUGAGGAUGAUCCU | 1585 | AGGAUCAUCCUCAAGCUCC |
| siRNA 446 | 446 | GAGCUUGAGGAUGAUCCUA | 1586 | UAGGAUCAUCCUCAAGCUC |
| siRNA 447 | 447 | AGCUUGAGGAUGAUCCUAC | 1587 | GUAGGAUCAUCCUCAAGCU |
| siRNA 448 | 448 | GCUUGAGGAUGAUCCUACU | 1588 | AGUAGGAUCAUCCUCAAGC |
| siRNA 449 | 449 | CUUGAGGAUGAUCCUACUG | 1589 | CAGUAGGAUCAUCCUCAAG |
| siRNA 450 | 450 | UUGAGGAUGAUCCUACUGU | 1590 | ACAGUAGGAUCAUCCUCAA |
| siRNA 451 | 451 | UGAGGAUGAUCCUACUGUA | 1591 | UACAGUAGGAUCAUCCUCA |
| siRNA 452 | 452 | GAGGAUGAUCCUACUGUAG | 1592 | CUACAGUAGGAUCAUCCUC |
| siRNA 453 | 453 | AGGAUGAUCCUACUGUAGU | 1593 | ACUACAGUAGGAUCAUCCU |
| siRNA 454 | 454 | GGAUGAUCCUACUGUAGUC | 1594 | GACUACAGUAGGAUCAUCC |
| siRNA 455 | 455 | GAUGAUCCUACUGUAGUCA | 1595 | UGACUACAGUAGGAUCAUC |
| siRNA 456 | 456 | AUGAUCCUACUGUAGUCAA | 1596 | UUGACUACAGUAGGAUCAU |
| siRNA 457 | 457 | UGAUCCUACUGUAGUCAAA | 1597 | UUUGACUACAGUAGGAUCA |
| siRNA 458 | 458 | GAUCCUACUGUAGUCAAAA | 1598 | UUUUGACUACAGUAGGAUC |
| siRNA 459 | 459 | AUCCUACUGUAGUCAAAAA | 1599 | UUUUUGACUACAGUAGGAU |
| siRNA 460 | 460 | UCCUACUGUAGUCAAAAAC | 1600 | GUUUUUGACUACAGUAGGA |
| siRNA 461 | 461 | CCUACUGUAGUCAAAAACU | 1601 | AGUUUUUGACUACAGUAGG |
| siRNA 462 | 462 | CUACUGUAGUCAAAAACUA | 1602 | UAGUUUUUGACUACAGUAG |
| siRNA 463 | 463 | UACUGUAGUCAAAAACUAU | 1603 | AUAGUUUUUGACUACAGUA |
| siRNA 464 | 464 | ACUGUAGUCAAAAACUAUA | 1604 | UAUAGUUUUUGACUACAGU |
| siRNA 465 | 465 | CUGUAGUCAAAAACUAUAA | 1605 | UUAUAGUUUUUGACUACAG |
| siRNA 466 | 466 | UGUAGUCAAAAACUAUAAA | 1606 | UUUAUAGUUUUUGACUACA |
| siRNA 467 | 467 | GUAGUCAAAAACUAUAAAG | 1607 | CUUUAUAGUUUUUGACUAC |
| siRNA 468 | 468 | UAGUCAAAAACUAUAAAGA | 1608 | UCUUUAUAGUUUUUGACUA |
| siRNA 469 | 469 | AGUCAAAAACUAUAAAGAC | 1609 | GUCUUUAUAGUUUUUGACU |
| siRNA 470 | 470 | GUCAAAAACUAUAAAGACC | 1610 | GGUCUUUAUAGUUUUUGAC |
| siRNA 471 | 471 | UCAAAAACUAUAAAGACCU | 1611 | AGGUCUUUAUAGUUUUUGA |
| siRNA 472 | 472 | CAAAAACUAUAAAGACCUG | 1612 | CAGGUCUUUAUAGUUUUUG |
| siRNA 473 | 473 | AAAAACUAUAAAGACCUGG | 1613 | CCAGGUCUUUAUAGUUUUU |
| siRNA 474 | 474 | AAAACUAUAAAGACCUGGA | 1614 | UCCAGGUCUUUAUAGUUUU |
| siRNA 475 | 475 | AAACUAUAAAGACCUGGAA | 1615 | UUCCAGGUCUUUAUAGUUU |
| siRNA 476 | 476 | AACUAUAAAGACCUGGAAA | 1616 | UUUCCAGGUCUUUAUAGUU |
| siRNA 477 | 477 | ACUAUAAAGACCUGGAAAA | 1617 | UUUUCCAGGUCUUUAUAGU |
| siRNA 478 | 478 | CUAUAAAGACCUGGAAAAA | 1618 | UUUUUCCAGGUCUUUAUAG |
| siRNA 479 | 479 | UAUAAAGACCUGGAAAAAG | 1619 | CUUUUUCCAGGUCUUUAUA |
| siRNA 480 | 480 | AUAAAGACCUGGAAAAAGC | 1620 | GCUUUUUCCAGGUCUUUAU |
| siRNA 481 | 481 | UAAAGACCUGGAAAAAGCA | 1621 | UGCUUUUUCCAGGUCUUUA |
| siRNA 482 | 482 | AAAGACCUGGAAAAAGCAG | 1622 | CUGCUUUUUCCAGGUCUUU |
| siRNA 483 | 483 | AAGACCUGGAAAAAGCAGU | 1623 | ACUGCUUUUUCCAGGUCUU |
| siRNA 484 | 484 | AGACCUGGAAAAAGCAGUU | 1624 | AACUGCUUUUUCCAGGUCU |
| siRNA 485 | 485 | GACCUGGAAAAAGCAGUUC | 1625 | GAACUGCUUUUUCCAGGUC |
| siRNA 486 | 486 | ACCUGGAAAAAGCAGUUCA | 1626 | UGAACUGCUUUUUCCAGGU |
| siRNA 487 | 487 | CCUGGAAAAAGCAGUUCAG | 1627 | CUGAACUGCUUUUUCCAGG |
| siRNA 488 | 488 | CUGGAAAAAGCAGUUCAGU | 1628 | ACUGAACUGCUUUUUCCAG |
| siRNA 489 | 489 | UGGAAAAAGCAGUUCAGUC | 1629 | GACUGAACUGCUUUUUCCA |
| siRNA 490 | 490 | GGAAAAAGCAGUUCAGUCU | 1630 | AGACUGAACUGCUUUUUCC |
| siRNA 491 | 491 | GAAAAAGCAGUUCAGUCUU | 1631 | AAGACUGAACUGCUUUUUC |
| siRNA 492 | 492 | AAAAAGCAGUUCAGUCUUU | 1632 | AAAGACUGAACUGCUUUUU |
| siRNA 493 | 493 | AAAAGCAGUUCAGUCUUUU | 1633 | AAAAGACUGAACUGCUUUU |
| siRNA 494 | 494 | AAAGCAGUUCAGUCUUUUC | 1634 | GAAAAGACUGAACUGCUUU |
| siRNA 495 | 495 | AAGCAGUUCAGUCUUUUCG | 1635 | CGAAAAGACUGAACUGCUU |
| siRNA 496 | 496 | AGCAGUUCAGUCUUUUCGG | 1636 | CCGAAAAGACUGAACUGCU |
| siRNA 497 | 497 | GCAGUUCAGUCUUUUCGGU | 1637 | ACCGAAAAGACUGAACUGC |
| siRNA 498 | 498 | CAGUUCAGUCUUUUCGGUA | 1638 | UACCGAAAAGACUGAACUG |
| siRNA 499 | 499 | AGUUCAGUCUUUUCGGUAU | 1639 | AUACCGAAAAGACUGAACU |
| siRNA 500 | 500 | GUUCAGUCUUUUCGGUAUG | 1640 | CAUACCGAAAAGACUGAAC |
| siRNA 501 | 501 | UUCAGUCUUUUCGGUAUGA | 1641 | UCAUACCGAAAAGACUGAA |
| siRNA 502 | 502 | UCAGUCUUUUCGGUAUGAU | 1642 | AUCAUACCGAAAAGACUGA |
| siRNA 503 | 503 | CAGUCUUUUCGGUAUGAUG | 1643 | CAUCAUACCGAAAAGACUG |
| siRNA 504 | 504 | AGUCUUUUCGGUAUGAUGU | 1644 | ACAUCAUACCGAAAAGACU |
| siRNA 505 | 505 | GUCUUUUCGGUAUGAUGUU | 1645 | AACAUCAUACCGAAAAGAC |
| siRNA 506 | 506 | UCUUUUCGGUAUGAUGUUG | 1646 | CAACAUCAUACCGAAAAGA |
| siRNA 507 | 507 | CUUUUCGGUAUGAUGUUGU | 1647 | ACAACAUCAUACCGAAAAG |
| siRNA 508 | 508 | UUUUCGGUAUGAUGUUGUC | 1648 | GACAACAUCAUACCGAAAA |
| siRNA 509 | 509 | UUUCGGUAUGAUGUUGUCC | 1649 | GGACAACAUCAUACCGAAA |
| siRNA 510 | 510 | UUCGGUAUGAUGUUGUCCU | 1650 | AGGACAACAUCAUACCGAA |
| siRNA 511 | 511 | UCGGUAUGAUGUUGUCCUG | 1651 | CAGGACAACAUCAUACCGA |
| siRNA 512 | 512 | CGGUAUGAUGUUGUCCUGA | 1652 | UCAGGACAACAUCAUACCG |
| siRNA 513 | 513 | GGUAUGAUGUUGUCCUGAA | 1653 | UUCAGGACAACAUCAUACC |
| siRNA 514 | 514 | GUAUGAUGUUGUCCUGAAG | 1654 | CUUCAGGACAACAUCAUAC |
| siRNA 515 | 515 | UAUGAUGUUGUCCUGAAGA | 1655 | UCUUCAGGACAACAUCAUA |
| siRNA 516 | 516 | AUGAUGUUGUCCUGAAGAC | 1656 | GUCUUCAGGACAACAUCAU |
| siRNA 517 | 517 | UGAUGUUGUCCUGAAGACG | 1657 | CGUCUUCAGGACAACAUCA |
| siRNA 518 | 518 | GAUGUUGUCCUGAAGACGG | 1658 | CCGUCUUCAGGACAACAUC |
| siRNA 519 | 519 | AUGUUGUCCUGAAGACGGG | 1659 | CCCGUCUUCAGGACAACAU |
| siRNA 520 | 520 | UGUUGUCCUGAAGACGGGG | 1660 | CCCCGUCUUCAGGACAACA |
| siRNA 521 | 521 | GUUGUCCUGAAGACGGGGC | 1661 | GCCCCGUCUUCAGGACAAC |
| siRNA 522 | 522 | UUGUCCUGAAGACGGGGCU | 1662 | AGCCCCGUCUUCAGGACAA |
| siRNA 523 | 523 | UGUCCUGAAGACGGGGCUA | 1663 | UAGCCCCGUCUUCAGGACA |
| siRNA 524 | 524 | GUCCUGAAGACGGGGCUAG | 1664 | CUAGCCCCGUCUUCAGGAC |
| siRNA 525 | 525 | UCCUGAAGACGGGGCUAGA | 1665 | UCUAGCCCCGUCUUCAGGA |
| siRNA 526 | 526 | CCUGAAGACGGGGCUAGAU | 1666 | AUCUAGCCCCGUCUUCAGG |
| siRNA 527 | 527 | CUGAAGACGGGGCUAGAUA | 1667 | UAUCUAGCCCCGUCUUCAG |
| siRNA 528 | 528 | UGAAGACGGGGCUAGAUAU | 1668 | AUAUCUAGCCCCGUCUUCA |
| siRNA 529 | 529 | GAAGACGGGGCUAGAUAUU | 1669 | AAUAUCUAGCCCCGUCUUC |
| siRNA 530 | 530 | AAGACGGGGCUAGAUAUUG | 1670 | CAAUAUCUAGCCCCGUCUU |
| siRNA 531 | 531 | AGACGGGGCUAGAUAUUGG | 1671 | CCAAUAUCUAGCCCCGUCU |
| siRNA 532 | 532 | GACGGGGCUAGAUAUUGGG | 1672 | CCCAAUAUCUAGCCCCGUC |
| siRNA 533 | 533 | ACGGGGCUAGAUAUUGGGA | 1673 | UCCCAAUAUCUAGCCCCGU |
| siRNA 534 | 534 | CGGGGCUAGAUAUUGGGAG | 1674 | CUCCCAAUAUCUAGCCCCG |
| siRNA 535 | 535 | GGGGCUAGAUAUUGGGAGA | 1675 | UCUCCCAAUAUCUAGCCCC |
| siRNA 536 | 536 | GGGCUAGAUAUUGGGAGAA | 1676 | UUCUCCCAAUAUCUAGCCC |
| siRNA 537 | 537 | GGCUAGAUAUUGGGAGAAA | 1677 | UUUCUCCCAAUAUCUAGCC |
| siRNA 538 | 538 | GCUAGAUAUUGGGAGAAAC | 1678 | GUUUCUCCCAAUAUCUAGC |
| siRNA 539 | 539 | CUAGAUAUUGGGAGAAACA | 1679 | UGUUUCUCCCAAUAUCUAG |
| siRNA 540 | 540 | UAGAUAUUGGGAGAAACAA | 1680 | UUGUUUCUCCCAAUAUCUA |
| siRNA 541 | 541 | AGAUAUUGGGAGAAACAAA | 1681 | UUUGUUUCUCCCAAUAUCU |
| siRNA 542 | 542 | GAUAUUGGGAGAAACAAAG | 1682 | CUUUGUUUCUCCCAAUAUC |
| siRNA 543 | 543 | AUAUUGGGAGAAACAAAGU | 1683 | ACUUUGUUUCUCCCAAUAU |
| siRNA 544 | 544 | UAUUGGGAGAAACAAAGUG | 1684 | CACUUUGUUUCUCCCAAUA |
| siRNA 545 | 545 | AUUGGGAGAAACAAAGUGG | 1685 | CCACUUUGUUUCUCCCAAU |
| siRNA 546 | 546 | UUGGGAGAAACAAAGUGGA | 1686 | UCCACUUUGUUUCUCCCAA |
| siRNA 547 | 547 | UGGGAGAAACAAAGUGGAA | 1687 | UUCCACUUUGUUUCUCCCA |
| siRNA 548 | 548 | GGGAGAAACAAAGUGGAAG | 1688 | CUUCCACUUUGUUUCUCCC |
| siRNA 549 | 549 | GGAGAAACAAAGUGGAAGA | 1689 | UCUUCCACUUUGUUUCUCC |
| siRNA 550 | 550 | GAGAAACAAAGUGGAAGAU | 1690 | AUCUUCCACUUUGUUUCUC |
| siRNA 551 | 551 | AGAAACAAAGUGGAAGAUG | 1691 | CAUCUUCCACUUUGUUUCU |
| siRNA 552 | 552 | GAAACAAAGUGGAAGAUGC | 1692 | GCAUCUUCCACUUUGUUUC |
| siRNA 553 | 553 | AAACAAAGUGGAAGAUGCU | 1693 | AGCAUCUUCCACUUUGUUU |
| siRNA 554 | 554 | AACAAAGUGGAAGAUGCUU | 1694 | AAGCAUCUUCCACUUUGUU |
| siRNA 555 | 555 | ACAAAGUGGAAGAUGCUUU | 1695 | AAAGCAUCUUCCACUUUGU |
| siRNA 556 | 556 | CAAAGUGGAAGAUGCUUUC | 1696 | GAAAGCAUCUUCCACUUUG |
| siRNA 557 | 557 | AAAGUGGAAGAUGCUUUCU | 1697 | AGAAAGCAUCUUCCACUUU |
| siRNA 558 | 558 | AAGUGGAAGAUGCUUUCUA | 1698 | UAGAAAGCAUCUUCCACUU |
| siRNA 559 | 559 | AGUGGAAGAUGCUUUCUAC | 1699 | GUAGAAAGCAUCUUCCACU |
| siRNA 560 | 560 | GUGGAAGAUGCUUUCUACA | 1700 | UGUAGAAAGCAUCUUCCAC |
| siRNA 561 | 561 | UGGAAGAUGCUUUCUACAA | 1701 | UUGUAGAAAGCAUCUUCCA |
| siRNA 562 | 562 | GGAAGAUGCUUUCUACAAA | 1702 | UUUGUAGAAAGCAUCUUCC |
| siRNA 563 | 563 | GAAGAUGCUUUCUACAAAG | 1703 | CUUUGUAGAAAGCAUCUUC |
| siRNA 564 | 564 | AAGAUGCUUUCUACAAAGG | 1704 | CCUUUGUAGAAAGCAUCUU |
| siRNA 565 | 565 | AGAUGCUUUCUACAAAGGU | 1705 | ACCUUUGUAGAAAGCAUCU |
| siRNA 566 | 566 | GAUGCUUUCUACAAAGGUG | 1706 | CACCUUUGUAGAAAGCAUC |
| siRNA 567 | 567 | AUGCUUUCUACAAAGGUGA | 1707 | UCACCUUUGUAGAAAGCAU |
| siRNA 568 | 568 | UGCUUUCUACAAAGGUGAA | 1708 | UUCACCUUUGUAGAAAGCA |
| siRNA 569 | 569 | GCUUUCUACAAAGGUGAAC | 1709 | GUUCACCUUUGUAGAAAGC |
| siRNA 570 | 570 | CUUUCUACAAAGGUGAACU | 1710 | AGUUCACCUUUGUAGAAAG |
| siRNA 571 | 571 | UUUCUACAAAGGUGAACUC | 1711 | GAGUUCACCUUUGUAGAAA |
| siRNA 572 | 572 | UUCUACAAAGGUGAACUCA | 1712 | UGAGUUCACCUUUGUAGAA |
| siRNA 573 | 573 | UCUACAAAGGUGAACUCAG | 1713 | CUGAGUUCACCUUUGUAGA |
| siRNA 574 | 574 | CUACAAAGGUGAACUCAGG | 1714 | CCUGAGUUCACCUUUGUAG |
| siRNA 575 | 575 | UACAAAGGUGAACUCAGGC | 1715 | GCCUGAGUUCACCUUUGUA |
| siRNA 576 | 576 | ACAAAGGUGAACUCAGGCU | 1716 | AGCCUGAGUUCACCUUUGU |
| siRNA 577 | 577 | CAAAGGUGAACUCAGGCUG | 1717 | CAGCCUGAGUUCACCUUUG |
| siRNA 578 | 578 | AAAGGUGAACUCAGGCUGA | 1718 | UCAGCCUGAGUUCACCUUU |
| siRNA 579 | 579 | AAGGUGAACUCAGGCUGAA | 1719 | UUCAGCCUGAGUUCACCUU |
| siRNA 580 | 580 | AGGUGAACUCAGGCUGAAU | 1720 | AUUCAGCCUGAGUUCACCU |
| siRNA 581 | 581 | GGUGAACUCAGGCUGAAUG | 1721 | CAUUCAGCCUGAGUUCACC |
| siRNA 582 | 582 | GUGAACUCAGGCUGAAUGA | 1722 | UCAUUCAGCCUGAGUUCAC |
| siRNA 583 | 583 | UGAACUCAGGCUGAAUGAG | 1723 | CUCAUUCAGCCUGAGUUCA |
| siRNA 584 | 584 | GAACUCAGGCUGAAUGAGG | 1724 | CCUCAUUCAGCCUGAGUUC |
| siRNA 585 | 585 | AACUCAGGCUGAAUGAGGA | 1725 | UCCUCAUUCAGCCUGAGUU |
| siRNA 586 | 586 | ACUCAGGCUGAAUGAGGAA | 1726 | UUCCUCAUUCAGCCUGAGU |
| siRNA 587 | 587 | CUCAGGCUGAAUGAGGAAA | 1727 | UUUCCUCAUUCAGCCUGAG |
| siRNA 588 | 588 | UCAGGCUGAAUGAGGAAAA | 1728 | UUUUCCUCAUUCAGCCUGA |
| siRNA 589 | 589 | CAGGCUGAAUGAGGAAAAA | 1729 | UUUUUCCUCAUUCAGCCUG |
| siRNA 590 | 590 | AGGCUGAAUGAGGAAAAAU | 1730 | AUUUUUCCUCAUUCAGCCU |
| siRNA 591 | 591 | GGCUGAAUGAGGAAAAAUU | 1731 | AAUUUUUCCUCAUUCAGCC |
| siRNA 592 | 592 | GCUGAAUGAGGAAAAAUUA | 1732 | UAAUUUUUCCUCAUUCAGC |
| siRNA 593 | 593 | CUGAAUGAGGAAAAAUUAU | 1733 | AUAAUUUUUCCUCAUUCAG |
| siRNA 594 | 594 | UGAAUGAGGAAAAAUUAUG | 1734 | CAUAAUUUUUCCUCAUUCA |
| siRNA 595 | 595 | GAAUGAGGAAAAAUUAUGG | 1735 | CCAUAAUUUUUCCUCAUUC |
| siRNA 596 | 596 | AAUGAGGAAAAAUUAUGGA | 1736 | UCCAUAAUUUUUCCUCAUU |
| siRNA 597 | 597 | AUGAGGAAAAAUUAUGGAA | 1737 | UUCCAUAAUUUUUCCUCAU |
| siRNA 598 | 598 | UGAGGAAAAAUUAUGGAAG | 1738 | CUUCCAUAAUUUUUCCUCA |
| siRNA 599 | 599 | GAGGAAAAAUUAUGGAAGA | 1739 | UCUUCCAUAAUUUUUCCUC |
| siRNA 600 | 600 | AGGAAAAAUUAUGGAAGAA | 1740 | UUCUUCCAUAAUUUUUCCU |
| siRNA 601 | 601 | GGAAAAAUUAUGGAAGAAA | 1741 | UUUCUUCCAUAAUUUUUCC |
| siRNA 602 | 602 | GAAAAAUUAUGGAAGAAAA | 1742 | UUUUCUUCCAUAAUUUUUC |
| siRNA 603 | 603 | AAAAAUUAUGGAAGAAAAG | 1743 | CUUUUCUUCCAUAAUUUUU |
| siRNA 604 | 604 | AAAAUUAUGGAAGAAAAGC | 1744 | GCUUUUCUUCCAUAAUUUU |
| siRNA 605 | 605 | AAAUUAUGGAAGAAAAGCA | 1745 | UGCUUUUCUUCCAUAAUUU |
| siRNA 606 | 606 | AAUUAUGGAAGAAAAGCAG | 1746 | CUGCUUUUCUUCCAUAAUU |
| siRNA 607 | 607 | AUUAUGGAAGAAAAGCAGA | 1747 | UCUGCUUUUCUUCCAUAAU |
| siRNA 608 | 608 | UUAUGGAAGAAAAGCAGAA | 1748 | UUCUGCUUUUCUUCCAUAA |
| siRNA 609 | 609 | UAUGGAAGAAAAGCAGAAC | 1749 | GUUCUGCUUUUCUUCCAUA |
| siRNA 610 | 610 | AUGGAAGAAAAGCAGAACG | 1750 | CGUUCUGCUUUUCUUCCAU |
| siRNA 611 | 611 | UGGAAGAAAAGCAGAACGG | 1751 | CCGUUCUGCUUUUCUUCCA |
| siRNA 612 | 612 | GGAAGAAAAGCAGAACGGU | 1752 | ACCGUUCUGCUUUUCUUCC |
| siRNA 613 | 613 | GAAGAAAAGCAGAACGGUG | 1753 | CACCGUUCUGCUUUUCUUC |
| siRNA 614 | 614 | AAGAAAAGCAGAACGGUGA | 1754 | UCACCGUUCUGCUUUUCUU |
| siRNA 615 | 615 | AGAAAAGCAGAACGGUGAA | 1755 | UUCACCGUUCUGCUUUUCU |
| siRNA 616 | 616 | GAAAAGCAGAACGGUGAAA | 1756 | UUUCACCGUUCUGCUUUUC |
| siRNA 617 | 617 | AAAAGCAGAACGGUGAAAG | 1757 | CUUUCACCGUUCUGCUUUU |
| siRNA 618 | 618 | AAAGCAGAACGGUGAAAGU | 1758 | ACUUUCACCGUUCUGCUUU |
| siRNA 619 | 619 | AAGCAGAACGGUGAAAGUG | 1759 | CACUUUCACCGUUCUGCUU |
| siRNA 620 | 620 | AGCAGAACGGUGAAAGUGG | 1760 | CCACUUUCACCGUUCUGCU |
| siRNA 621 | 621 | GCAGAACGGUGAAAGUGGG | 1761 | CCCACUUUCACCGUUCUGC |
| siRNA 622 | 622 | CAGAACGGUGAAAGUGGGA | 1762 | UCCCACUUUCACCGUUCUG |
| siRNA 623 | 623 | AGAACGGUGAAAGUGGGAG | 1763 | CUCCCACUUUCACCGUUCU |
| siRNA 624 | 624 | GAACGGUGAAAGUGGGAGA | 1764 | UCUCCCACUUUCACCGUUC |
| siRNA 625 | 625 | AACGGUGAAAGUGGGAGAU | 1765 | AUCUCCCACUUUCACCGUU |
| siRNA 626 | 626 | ACGGUGAAAGUGGGAGAUA | 1766 | UAUCUCCCACUUUCACCGU |
| siRNA 627 | 627 | CGGUGAAAGUGGGAGAUAC | 1767 | GUAUCUCCCACUUUCACCG |
| siRNA 628 | 628 | GGUGAAAGUGGGAGAUACA | 1768 | UGUAUCUCCCACUUUCACC |
| siRNA 629 | 629 | GUGAAAGUGGGAGAUACAU | 1769 | AUGUAUCUCCCACUUUCAC |
| siRNA 630 | 630 | UGAAAGUGGGAGAUACAUU | 1770 | AAUGUAUCUCCCACUUUCA |
| siRNA 631 | 631 | GAAAGUGGGAGAUACAUUG | 1771 | CAAUGUAUCUCCCACUUUC |
| siRNA 632 | 632 | AAAGUGGGAGAUACAUUGG | 1772 | CCAAUGUAUCUCCCACUUU |
| siRNA 633 | 633 | AAGUGGGAGAUACAUUGGA | 1773 | UCCAAUGUAUCUCCCACUU |
| siRNA 634 | 634 | AGUGGGAGAUACAUUGGAU | 1774 | AUCCAAUGUAUCUCCCACU |
| siRNA 635 | 635 | GUGGGAGAUACAUUGGAUC | 1775 | GAUCCAAUGUAUCUCCCAC |
| siRNA 636 | 636 | UGGGAGAUACAUUGGAUCU | 1776 | AGAUCCAAUGUAUCUCCCA |
| siRNA 637 | 637 | GGGAGAUACAUUGGAUCUU | 1777 | AAGAUCCAAUGUAUCUCCC |
| siRNA 638 | 638 | GGAGAUACAUUGGAUCUUC | 1778 | GAAGAUCCAAUGUAUCUCC |
| siRNA 639 | 639 | GAGAUACAUUGGAUCUUCU | 1779 | AGAAGAUCCAAUGUAUCUC |
| siRNA 640 | 640 | AGAUACAUUGGAUCUUCUC | 1780 | GAGAAGAUCCAAUGUAUCU |
| siRNA 641 | 641 | GAUACAUUGGAUCUUCUCA | 1781 | UGAGAAGAUCCAAUGUAUC |
| siRNA 642 | 642 | AUACAUUGGAUCUUCUCAU | 1782 | AUGAGAAGAUCCAAUGUAU |
| siRNA 643 | 643 | UACAUUGGAUCUUCUCAUU | 1783 | AAUGAGAAGAUCCAAUGUA |
| siRNA 644 | 644 | ACAUUGGAUCUUCUCAUUG | 1784 | CAAUGAGAAGAUCCAAUGU |
| siRNA 645 | 645 | CAUUGGAUCUUCUCAUUGG | 1785 | CCAAUGAGAAGAUCCAAUG |
| siRNA 646 | 646 | AUUGGAUCUUCUCAUUGGA | 1786 | UCCAAUGAGAAGAUCCAAU |
| siRNA 647 | 647 | UUGGAUCUUCUCAUUGGAG | 1787 | CUCCAAUGAGAAGAUCCAA |
| siRNA 648 | 648 | UGGAUCUUCUCAUUGGAGA | 1788 | UCUCCAAUGAGAAGAUCCA |
| siRNA 649 | 649 | GGAUCUUCUCAUUGGAGAG | 1789 | CUCUCCAAUGAGAAGAUCC |
| siRNA 650 | 650 | GAUCUUCUCAUUGGAGAGG | 1790 | CCUCUCCAAUGAGAAGAUC |
| siRNA 651 | 651 | AUCUUCUCAUUGGAGAGGA | 1791 | UCCUCUCCAAUGAGAAGAU |
| siRNA 652 | 652 | UCUUCUCAUUGGAGAGGAU | 1792 | AUCCUCUCCAAUGAGAAGA |
| siRNA 653 | 653 | CUUCUCAUUGGAGAGGAUA | 1793 | UAUCCUCUCCAAUGAGAAG |
| siRNA 654 | 654 | UUCUCAUUGGAGAGGAUAA | 1794 | UUAUCCUCUCCAAUGAGAA |
| siRNA 655 | 655 | UCUCAUUGGAGAGGAUAAA | 1795 | UUUAUCCUCUCCAAUGAGA |
| siRNA 656 | 656 | CUCAUUGGAGAGGAUAAAG | 1796 | CUUUAUCCUCUCCAAUGAG |
| siRNA 657 | 657 | UCAUUGGAGAGGAUAAAGA | 1797 | UCUUUAUCCUCUCCAAUGA |
| siRNA 658 | 658 | CAUUGGAGAGGAUAAAGAA | 1798 | UUCUUUAUCCUCUCCAAUG |
| siRNA 659 | 659 | AUUGGAGAGGAUAAAGAAG | 1799 | CUUCUUUAUCCUCUCCAAU |
| siRNA 660 | 660 | UUGGAGAGGAUAAAGAAGC | 1800 | GCUUCUUUAUCCUCUCCAA |
| siRNA 661 | 661 | UGGAGAGGAUAAAGAAGCA | 1801 | UGCUUCUUUAUCCUCUCCA |
| siRNA 662 | 662 | GGAGAGGAUAAAGAAGCAG | 1802 | CUGCUUCUUUAUCCUCUCC |
| SiRNA 663 | 663 | GAGAGGAUAAAGAAGCAGG | 1803 | CCUGCUUCUUUAUCCUCUC |
| siRNA 664 | 664 | AGAGGAUAAAGAAGCAGGA | 1804 | UCCUGCUUCUUUAUCCUCU |
| siRNA 665 | 665 | GAGGAUAAAGAAGCAGGAA | 1805 | UUCCUGCUUCUUUAUCCUC |
| siRNA 666 | 666 | AGGAUAAAGAAGCAGGAAC | 1806 | GUUCCUGCUUCUUUAUCCU |
| siRNA 667 | 667 | GGAUAAAGAAGCAGGAACA | 1807 | UGUUCCUGCUUCUUUAUCC |
| siRNA 668 | 668 | GAUAAAGAAGCAGGAACAG | 1808 | CUGUUCCUGCUUCUUUAUC |
| siRNA 669 | 669 | AUAAAGAAGCAGGAACAGA | 1809 | UCUGUUCCUGCUUCUUUAU |
| siRNA 670 | 670 | UAAAGAAGCAGGAACAGAG | 1810 | CUCUGUUCCUGCUUCUUUA |
| siRNA 671 | 671 | AAAGAAGCAGGAACAGAGA | 1811 | UCUCUGUUCCUGCUUCUUU |
| siRNA 672 | 672 | AAGAAGCAGGAACAGAGAC | 1812 | GUCUCUGUUCCUGCUUCUU |
| siRNA 673 | 673 | AGAAGCAGGAACAGAGACA | 1813 | UGUCUCUGUUCCUGCUUCU |
| siRNA 674 | 674 | GAAGCAGGAACAGAGACAG | 1814 | CUGUCUCUGUUCCUGCUUC |
| siRNA 675 | 675 | AAGCAGGAACAGAGACAGU | 1815 | ACUGUCUCUGUUCCUGCUU |
| siRNA 676 | 676 | AGCAGGAACAGAGACAGUU | 1816 | AACUGUCUCUGUUCCUGCU |
| siRNA 677 | 677 | GCAGGAACAGAGACAGUUA | 1817 | UAACUGUCUCUGUUCCUGC |
| siRNA 678 | 678 | CAGGAACAGAGACAGUUAU | 1818 | AUAACUGUCUCUGUUCCUG |
| siRNA 679 | 679 | AGGAACAGAGACAGUUAUG | 1819 | CAUAACUGUCUCUGUUCCU |
| siRNA 680 | 680 | GGAACAGAGACAGUUAUGC | 1820 | GCAUAACUGUCUCUGUUCC |
| siRNA 681 | 681 | GAACAGAGACAGUUAUGCG | 1821 | CGCAUAACUGUCUCUGUUC |
| siRNA 682 | 682 | AACAGAGACAGUUAUGCGG | 1822 | CCGCAUAACUGUCUCUGUU |
| siRNA 683 | 683 | ACAGAGACAGUUAUGCGGA | 1823 | UCCGCAUAACUGUCUCUGU |
| siRNA 684 | 684 | CAGAGACAGUUAUGCGGAU | 1824 | AUCCGCAUAACUGUCUCUG |
| siRNA 685 | 685 | AGAGACAGUUAUGCGGAUU | 1825 | AAUCCGCAUAACUGUCUCU |
| siRNA 686 | 686 | GAGACAGUUAUGCGGAUUC | 1826 | GAAUCCGCAUAACUGUCUC |
| siRNA 687 | 687 | AGACAGUUAUGCGGAUUCU | 1827 | AGAAUCCGCAUAACUGUCU |
| siRNA 688 | 688 | GACAGUUAUGCGGAUUCUC | 1828 | GAGAAUCCGCAUAACUGUC |
| siRNA 689 | 689 | ACAGUUAUGCGGAUUCUCU | 1829 | AGAGAAUCCGCAUAACUGU |
| siRNA 690 | 690 | CAGUUAUGCGGAUUCUCUU | 1830 | AAGAGAAUCCGCAUAACUG |
| siRNA 691 | 691 | AGUUAUGCGGAUUCUCUUG | 1831 | CAAGAGAAUCCGCAUAACU |
| siRNA 692 | 692 | GUUAUGCGGAUUCUCUUGA | 1832 | UCAAGAGAAUCCGCAUAAC |
| siRNA 693 | 693 | UUAUGCGGAUUCUCUUGAA | 1833 | UUCAAGAGAAUCCGCAUAA |
| siRNA 694 | 694 | UAUGCGGAUUCUCUUGAAA | 1834 | UUUCAAGAGAAUCCGCAUA |
| siRNA 695 | 695 | AUGCGGAUUCUCUUGAAAA | 1835 | UUUUCAAGAGAAUCCGCAU |
| siRNA 696 | 696 | UGCGGAUUCUCUUGAAAAA | 1836 | UUUUUCAAGAGAAUCCGCA |
| siRNA 697 | 697 | GCGGAUUCUCUUGAAAAAA | 1837 | UUUUUUCAAGAGAAUCCGC |
| siRNA 698 | 698 | CGGAUUCUCUUGAAAAAAG | 1838 | CUUUUUUCAAGAGAAUCCG |
| siRNA 699 | 699 | GGAUUCUCUUGAAAAAAGU | 1839 | ACUUUUUUCAAGAGAAUCC |
| siRNA 700 | 700 | GAUUCUCUUGAAAAAAGUG | 1840 | CACUUUUUUCAAGAGAAUC |
| siRNA 701 | 701 | AUUCUCUUGAAAAAAGUGU | 1841 | ACACUUUUUUCAAGAGAAU |
| siRNA 702 | 702 | UUCUCUUGAAAAAAGUGUU | 1842 | AACACUUUUUUCAAGAGAA |
| siRNA 703 | 703 | UCUCUUGAAAAAAGUGUUU | 1843 | AAACACUUUUUUCAAGAGA |
| siRNA 704 | 704 | CUCUUGAAAAAAGUGUUUG | 1844 | CAAACACUUUUUUCAAGAG |
| siRNA 705 | 705 | UCUUGAAAAAAGUGUUUGA | 1845 | UCAAACACUUUUUUCAAGA |
| siRNA 706 | 706 | CUUGAAAAAAGUGUUUGAA | 1846 | UUCAAACACUUUUUUCAAG |
| siRNA 707 | 707 | UUGAAAAAAGUGUUUGAAG | 1847 | CUUCAAACACUUUUUUCAA |
| siRNA 708 | 708 | UGAAAAAAGUGUUUGAAGA | 1848 | UCUUCAAACACUUUUUUCA |
| siRNA 709 | 709 | GAAAAAAGUGUUUGAAGAG | 1849 | CUCUUCAAACACUUUUUUC |
| siRNA 710 | 710 | AAAAAAGUGUUUGAAGAGA | 1850 | UCUCUUCAAACACUUUUUU |
| siRNA 711 | 711 | AAAAAGUGUUUGAAGAGAA | 1851 | UUCUCUUCAAACACUUUUU |
| siRNA 712 | 712 | AAAAGUGUUUGAAGAGAAG | 1852 | CUUCUCUUCAAACACUUUU |
| siRNA 713 | 713 | AAAGUGUUUGAAGAGAAGA | 1853 | UCUUCUCUUCAAACACUUU |
| siRNA 714 | 714 | AAGUGUUUGAAGAGAAGAC | 1854 | GUCUUCUCUUCAAACACUU |
| siRNA 715 | 715 | AGUGUUUGAAGAGAAGACU | 1855 | AGUCUUCUCUUCAAACACU |
| siRNA 716 | 716 | GUGUUUGAAGAGAAGACUG | 1856 | CAGUCUUCUCUUCAAACAC |
| siRNA 717 | 717 | UGUUUGAAGAGAAGACUGA | 1857 | UCAGUCUUCUCUUCAAACA |
| siRNA 718 | 718 | GUUUGAAGAGAAGACUGAA | 1858 | UUCAGUCUUCUCUUCAAAC |
| siRNA 719 | 719 | UUUGAAGAGAAGACUGAAA | 1859 | UUUCAGUCUUCUCUUCAAA |
| siRNA 720 | 720 | UUGAAGAGAAGACUGAAAG | 1860 | CUUUCAGUCUUCUCUUCAA |
| siRNA 721 | 721 | UGAAGAGAAGACUGAAAGU | 1861 | ACUUUCAGUCUUCUCUUCA |
| siRNA 722 | 722 | GAAGAGAAGACUGAAAGUG | 1862 | CACUUUCAGUCUUCUCUUC |
| siRNA 723 | 723 | AAGAGAAGACUGAAAGUGA | 1863 | UCACUUUCAGUCUUCUCUU |
| siRNA 724 | 724 | AGAGAAGACUGAAAGUGAA | 1864 | UUCACUUUCAGUCUUCUCU |
| siRNA 725 | 725 | GAGAAGACUGAAAGUGAAA | 1865 | UUUCACUUUCAGUCUUCUC |
| siRNA 726 | 726 | AGAAGACUGAAAGUGAAAA | 1866 | UUUUCACUUUCAGUCUUCU |
| siRNA 727 | 727 | GAAGACUGAAAGUGAAAAA | 1867 | UUUUUCACUUUCAGUCUUC |
| siRNA 728 | 728 | AAGACUGAAAGUGAAAAAU | 1868 | AUUUUUCACUUUCAGUCUU |
| siRNA 729 | 729 | AGACUGAAAGUGAAAAAUA | 1869 | UAUUUUUCACUUUCAGUCU |
| siRNA 730 | 730 | GACUGAAAGUGAAAAAUAC | 1870 | GUAUUUUUCACUUUCAGUC |
| siRNA 731 | 731 | ACUGAAAGUGAAAAAUACA | 1871 | UGUAUUUUUCACUUUCAGU |
| siRNA 732 | 732 | CUGAAAGUGAAAAAUACAG | 1872 | CUGUAUUUUUCACUUUCAG |
| siRNA 733 | 733 | UGAAAGUGAAAAAUACAGA | 1873 | UCUGUAUUUUUCACUUUCA |
| siRNA 734 | 734 | GAAAGUGAAAAAUACAGAG | 1874 | CUCUGUAUUUUUCACUUUC |
| siRNA 735 | 735 | AAAGUGAAAAAUACAGAGU | 1875 | ACUCUGUAUUUUUCACUUU |
| siRNA 736 | 736 | AAGUGAAAAAUACAGAGUG | 1876 | CACUCUGUAUUUUUCACUU |
| siRNA 737 | 737 | AGUGAAAAAUACAGAGUGG | 1877 | CCACUCUGUAUUUUUCACU |
| siRNA 738 | 738 | GUGAAAAAUACAGAGUGGU | 1878 | ACCACUCUGUAUUUUUCAC |
| siRNA 739 | 739 | UGAAAAAUACAGAGUGGUG | 1879 | CACCACUCUGUAUUUUUCA |
| siRNA 740 | 740 | GAAAAAUACAGAGUGGUGU | 1880 | ACACCACUCUGUAUUUUUC |
| siRNA 741 | 741 | AAAAAUACAGAGUGGUGUU | 1881 | AACACCACUCUGUAUUUUU |
| siRNA 742 | 742 | AAAAUACAGAGUGGUGUUA | 1882 | UAACACCACUCUGUAUUUU |
| siRNA 743 | 743 | AAAUACAGAGUGGUGUUAC | 1883 | GUAACACCACUCUGUAUUU |
| siRNA 744 | 744 | AAUACAGAGUGGUGUUACG | 1884 | CGUAACACCACUCUGUAUU |
| siRNA 745 | 745 | AUACAGAGUGGUGUUACGG | 1885 | CCGUAACACCACUCUGUAU |
| siRNA 746 | 746 | UACAGAGUGGUGUUACGGC | 1886 | GCCGUAACACCACUCUGUA |
| siRNA 747 | 747 | ACAGAGUGGUGUUACGGCG | 1887 | CGCCGUAACACCACUCUGU |
| siRNA 748 | 748 | CAGAGUGGUGUUACGGCGG | 1888 | CCGCCGUAACACCACUCUG |
| siRNA 749 | 749 | AGAGUGGUGUUACGGCGGU | 1889 | ACCGCCGUAACACCACUCU |
| siRNA 750 | 750 | GAGUGGUGUUACGGCGGUG | 1890 | CACCGCCGUAACACCACUC |
| siRNA 751 | 751 | AGUGGUGUUACGGCGGUGG | 1891 | CCACCGCCGUAACACCACU |
| siRNA 752 | 752 | GUGGUGUUACGGCGGUGGA | 1892 | UCCACCGCCGUAACACCAC |
| siRNA 753 | 753 | UGGUGUUACGGCGGUGGAA | 1893 | UUCCACCGCCGUAACACCA |
| siRNA 754 | 754 | GGUGUUACGGCGGUGGAAA | 1894 | UUUCCACCGCCGUAACACC |
| siRNA 755 | 755 | GUGUUACGGCGGUGGAAAA | 1895 | UUUUCCACCGCCGUAACAC |
| siRNA 756 | 756 | UGUUACGGCGGUGGAAAAG | 1896 | CUUUUCCACCGCCGUAACA |
| siRNA 757 | 757 | GUUACGGCGGUGGAAAAGU | 1897 | ACUUUUCCACCGCCGUAAC |
| siRNA 758 | 758 | UUACGGCGGUGGAAAAGUU | 1898 | AACUUUUCCACCGCCGUAA |
| siRNA 759 | 759 | UACGGCGGUGGAAAAGUUU | 1899 | AAACUUUUCCACCGCCGUA |
| siRNA 760 | 760 | ACGGCGGUGGAAAAGUUUA | 1900 | UAAACUUUUCCACCGCCGU |
| siRNA 761 | 761 | CGGCGGUGGAAAAGUUUAA | 1901 | UUAAACUUUUCCACCGCCG |
| siRNA 762 | 762 | GGCGGUGGAAAAGUUUAAA | 1902 | UUUAAACUUUUCCACCGCC |
| siRNA 763 | 763 | GCGGUGGAAAAGUUUAAAG | 1903 | CUUUAAACUUUUCCACCGC |
| siRNA 764 | 764 | CGGUGGAAAAGUUUAAAGU | 1904 | ACUUUAAACUUUUCCACCG |
| siRNA 765 | 765 | GGUGGAAAAGUUUAAAGUU | 1905 | AACUUUAAACUUUUCCACC |
| siRNA 766 | 766 | GUGGAAAAGUUUAAAGUUG | 1906 | CAACUUUAAACUUUUCCAC |
| siRNA 767 | 767 | UGGAAAAGUUUAAAGUUGC | 1907 | GCAACUUUAAACUUUUCCA |
| siRNA 768 | 768 | GGAAAAGUUUAAAGUUGCC | 1908 | GGCAACUUUAAACUUUUCC |
| siRNA 769 | 769 | GAAAAGUUUAAAGUUGCCU | 1909 | AGGCAACUUUAAACUUUUC |
| siRNA 770 | 770 | AAAAGUUUAAAGUUGCCUA | 1910 | UAGGCAACUUUAAACUUUU |
| siRNA 771 | 771 | AAAGUUUAAAGUUGCCUAA | 1911 | UUAGGCAACUUUAAACUUU |
| siRNA 772 | 772 | AAGUUUAAAGUUGCCUAAG | 1912 | CUUAGGCAACUUUAAACUU |
| siRNA 773 | 773 | AGUUUAAAGUUGCCUAAGA | 1913 | UCUUAGGCAACUUUAAACU |
| siRNA 774 | 774 | GUUUAAAGUUGCCUAAGAA | 1914 | UUCUUAGGCAACUUUAAAC |
| siRNA 775 | 775 | UUUAAAGUUGCCUAAGAAG | 1915 | CUUCUUAGGCAACUUUAAA |
| siRNA 776 | 776 | UUAAAGUUGCCUAAGAAGA | 1916 | UCUUCUUAGGCAACUUUAA |
| siRNA 777 | 777 | UAAAGUUGCCUAAGAAGAG | 1917 | CUCUUCUUAGGCAACUUUA |
| siRNA 778 | 778 | AAAGUUGCCUAAGAAGAGA | 1918 | UCUCUUCUUAGGCAACUUU |
| siRNA 779 | 779 | AAGUUGCCUAAGAAGAGAA | 1919 | UUCUCUUCUUAGGCAACUU |
| siRNA 780 | 780 | AGUUGCCUAAGAAGAGAAU | 1920 | AUUCUCUUCUUAGGCAACU |
| siRNA 781 | 781 | GUUGCCUAAGAAGAGAAUG | 1921 | CAUUCUCUUCUUAGGCAAC |
| siRNA 782 | 782 | UUGCCUAAGAAGAGAAUGU | 1922 | ACAUUCUCUUCUUAGGCAA |
| siRNA 783 | 783 | UGCCUAAGAAGAGAAUGUC | 1923 | GACAUUCUCUUCUUAGGCA |
| siRNA 784 | 784 | GCCUAAGAAGAGAAUGUCU | 1924 | AGACAUUCUCUUCUUAGGC |
| siRNA 785 | 785 | CCUAAGAAGAGAAUGUCUA | 1925 | UAGACAUUCUCUUCUUAGG |
| siRNA 786 | 786 | CUAAGAAGAGAAUGUCUAA | 1926 | UUAGACAUUCUCUUCUUAG |
| siRNA 787 | 787 | UAAGAAGAGAAUGUCUAAA | 1927 | UUUAGACAUUCUCUUCUUA |
| siRNA 788 | 788 | AAGAAGAGAAUGUCUAAAU | 1928 | AUUUAGACAUUCUCUUCUU |
| siRNA 789 | 789 | AGAAGAGAAUGUCUAAAUA | 1929 | UAUUUAGACAUUCUCUUCU |
| siRNA 790 | 790 | GAAGAGAAUGUCUAAAUAA | 1930 | UUAUUUAGACAUUCUCUUC |
| siRNA 791 | 791 | AAGAGAAUGUCUAAAUAAA | 1931 | UUUAUUUAGACAUUCUCUU |
| siRNA 792 | 792 | AGAGAAUGUCUAAAUAAAU | 1932 | AUUUAUUUAGACAUUCUCU |
| siRNA 793 | 793 | GAGAAUGUCUAAAUAAAUG | 1933 | CAUUUAUUUAGACAUUCUC |
| siRNA 794 | 794 | AGAAUGUCUAAAUAAAUGG | 1934 | CCAUUUAUUUAGACAUUCU |
| siRNA 795 | 795 | GAAUGUCUAAAUAAAUGGA | 1935 | UCCAUUUAUUUAGACAUUC |
| siRNA 796 | 796 | AAUGUCUAAAUAAAUGGAU | 1936 | AUCCAUUUAUUUAGACAUU |
| siRNA 797 | 797 | AUGUCUAAAUAAAUGGAUU | 1937 | AAUCCAUUUAUUUAGACAU |
| siRNA 798 | 798 | UGUCUAAAUAAAUGGAUUG | 1938 | CAAUCCAUUUAUUUAGACA |
| siRNA 799 | 799 | GUCUAAAUAAAUGGAUUGC | 1939 | GCAAUCCAUUUAUUUAGAC |
| siRNA 800 | 800 | UCUAAAUAAAUGGAUUGCU | 1940 | AGCAAUCCAUUUAUUUAGA |
| siRNA 801 | 801 | CUAAAUAAAUGGAUUGCUU | 1941 | AAGCAAUCCAUUUAUUUAG |
| siRNA 802 | 802 | UAAAUAAAUGGAUUGCUUU | 1942 | AAAGCAAUCCAUUUAUUUA |
| siRNA 803 | 803 | AAAUAAAUGGAUUGCUUUU | 1943 | AAAAGCAAUCCAUUUAUUU |
| siRNA 804 | 804 | AAUAAAUGGAUUGCUUUUU | 1944 | AAAAAGCAAUCCAUUUAUU |
| siRNA 805 | 805 | AUAAAUGGAUUGCUUUUUA | 1945 | UAAAAAGCAAUCCAUUUAU |
| siRNA 806 | 806 | UAAAUGGAUUGCUUUUUAG | 1946 | CUAAAAAGCAAUCCAUUUA |
| siRNA 807 | 807 | AAAUGGAUUGCUUUUUAGC | 1947 | GCUAAAAAGCAAUCCAUUU |
| siRNA 808 | 808 | AAUGGAUUGCUUUUUAGCA | 1948 | UGCUAAAAAGCAAUCCAUU |
| siRNA 809 | 809 | AUGGAUUGCUUUUUAGCAA | 1949 | UUGCUAAAAAGCAAUCCAU |
| siRNA 810 | 810 | UGGAUUGCUUUUUAGCAAU | 1950 | AUUGCUAAAAAGCAAUCCA |
| siRNA 811 | 811 | GGAUUGCUUUUUAGCAAUA | 1951 | UAUUGCUAAAAAGCAAUCC |
| siRNA 812 | 812 | GAUUGCUUUUUAGCAAUAG | 1952 | CUAUUGCUAAAAAGCAAUC |
| siRNA 813 | 813 | AUUGCUUUUUAGCAAUAGA | 1953 | UCUAUUGCUAAAAAGCAAU |
| siRNA 814 | 814 | UUGCUUUUUAGCAAUAGAG | 1954 | CUCUAUUGCUAAAAAGCAA |
| siRNA 815 | 815 | UGCUUUUUAGCAAUAGAGC | 1955 | GCUCUAUUGCUAAAAAGCA |
| siRNA 816 | 816 | GCUUUUUAGCAAUAGAGCU | 1956 | AGCUCUAUUGCUAAAAAGC |
| siRNA 817 | 817 | CUUUUUAGCAAUAGAGCUG | 1957 | CAGCUCUAUUGCUAAAAAG |
| siRNA 818 | 818 | UUUUUAGCAAUAGAGCUGC | 1958 | GCAGCUCUAUUGCUAAAAA |
| siRNA 819 | 819 | UUUUAGCAAUAGAGCUGCU | 1959 | AGCAGCUCUAUUGCUAAAA |
| siRNA 820 | 820 | UUUAGCAAUAGAGCUGCUU | 1960 | AAGCAGCUCUAUUGCUAAA |
| siRNA 821 | 821 | UUAGCAAUAGAGCUGCUUU | 1961 | AAAGCAGCUCUAUUGCUAA |
| siRNA 822 | 822 | UAGCAAUAGAGCUGCUUUC | 1962 | GAAAGCAGCUCUAUUGCUA |
| siRNA 823 | 823 | AGCAAUAGAGCUGCUUUCU | 1963 | AGAAAGCAGCUCUAUUGCU |
| siRNA 824 | 824 | GCAAUAGAGCUGCUUUCUA | 1964 | UAGAAAGCAGCUCUAUUGC |
| siRNA 825 | 825 | CAAUAGAGCUGCUUUCUAG | 1965 | CUAGAAAGCAGCUCUAUUG |
| siRNA 826 | 826 | AAUAGAGCUGCUUUCUAGU | 1966 | ACUAGAAAGCAGCUCUAUU |
| siRNA 827 | 827 | AUAGAGCUGCUUUCUAGUG | 1967 | CACUAGAAAGCAGCUCUAU |
| siRNA 828 | 828 | UAGAGCUGCUUUCUAGUGG | 1968 | CCACUAGAAAGCAGCUCUA |
| siRNA 829 | 829 | AGAGCUGCUUUCUAGUGGU | 1969 | ACCACUAGAAAGCAGCUCU |
| siRNA 830 | 830 | GAGCUGCUUUCUAGUGGUA | 1970 | UACCACUAGAAAGCAGCUC |
| siRNA 831 | 831 | AGCUGCUUUCUAGUGGUAA | 1971 | UUACCACUAGAAAGCAGCU |
| siRNA 832 | 832 | GCUGCUUUCUAGUGGUAAA | 1972 | UUUACCACUAGAAAGCAGC |
| siRNA 833 | 833 | CUGCUUUCUAGUGGUAAAG | 1973 | CUUUACCACUAGAAAGCAG |
| siRNA 834 | 834 | UGCUUUCUAGUGGUAAAGG | 1974 | CCUUUACCACUAGAAAGCA |
| siRNA 835 | 835 | GCUUUCUAGUGGUAAAGGA | 1975 | UCCUUUACCACUAGAAAGC |
| siRNA 836 | 836 | CUUUCUAGUGGUAAAGGAA | 1976 | UUCCUUUACCACUAGAAAG |
| siRNA 837 | 837 | UUUCUAGUGGUAAAGGAAG | 1977 | CUUCCUUUACCACUAGAAA |
| siRNA 838 | 838 | UUCUAGUGGUAAAGGAAGG | 1978 | CCUUCCUUUACCACUAGAA |
| siRNA 839 | 839 | UCUAGUGGUAAAGGAAGGG | 1979 | CCCUUCCUUUACCACUAGA |
| siRNA 840 | 840 | CUAGUGGUAAAGGAAGGGG | 1980 | CCCCUUCCUUUACCACUAG |
| siRNA 841 | 841 | UAGUGGUAAAGGAAGGGGU | 1981 | ACCCCUUCCUUUACCACUA |
| siRNA 842 | 842 | AGUGGUAAAGGAAGGGGUC | 1982 | GACCCCUUCCUUUACCACU |
| siRNA 843 | 843 | GUGGUAAAGGAAGGGGUCA | 1983 | UGACCCCUUCCUUUACCAC |
| siRNA 844 | 844 | UGGUAAAGGAAGGGGUCAC | 1984 | GUGACCCCUUCCUUUACCA |
| siRNA 845 | 845 | GGUAAAGGAAGGGGUCACC | 1985 | GGUGACCCCUUCCUUUACC |
| siRNA 846 | 846 | GUAAAGGAAGGGGUCACCU | 1986 | AGGUGACCCCUUCCUUUAC |
| siRNA 847 | 847 | UAAAGGAAGGGGUCACCUG | 1987 | CAGGUGACCCCUUCCUUUA |
| siRNA 848 | 848 | AAAGGAAGGGGUCACCUGA | 1988 | UCAGGUGACCCCUUCCUUU |
| siRNA 849 | 849 | AAGGAAGGGGUCACCUGAA | 1989 | UUCAGGUGACCCCUUCCUU |
| siRNA 850 | 850 | AGGAAGGGGUCACCUGAAA | 1990 | UUUCAGGUGACCCCUUCCU |
| siRNA 851 | 851 | GGAAGGGGUCACCUGAAAA | 1991 | UUUUCAGGUGACCCCUUCC |
| siRNA 852 | 852 | GAAGGGGUCACCUGAAAAA | 1992 | UUUUUCAGGUGACCCCUUC |
| siRNA 853 | 853 | AAGGGGUCACCUGAAAAAU | 1993 | AUUUUUCAGGUGACCCCUU |
| siRNA 854 | 854 | AGGGGUCACCUGAAAAAUA | 1994 | UAUUUUUCAGGUGACCCCU |
| siRNA 855 | 855 | GGGGUCACCUGAAAAAUAG | 1995 | CUAUUUUUCAGGUGACCCC |
| siRNA 856 | 856 | GGGUCACCUGAAAAAUAGG | 1996 | CCUAUUUUUCAGGUGACCC |
| siRNA 857 | 857 | GGUCACCUGAAAAAUAGGA | 1997 | UCCUAUUUUUCAGGUGACC |
| siRNA 858 | 858 | GUCACCUGAAAAAUAGGAC | 1998 | GUCCUAUUUUUCAGGUGAC |
| siRNA 859 | 859 | UCACCUGAAAAAUAGGACA | 1999 | UGUCCUAUUUUUCAGGUGA |
| siRNA 860 | 860 | CACCUGAAAAAUAGGACAU | 2000 | AUGUCCUAUUUUUCAGGUG |
| siRNA 861 | 861 | ACCUGAAAAAUAGGACAUU | 2001 | AAUGUCCUAUUUUUCAGGU |
| siRNA 862 | 862 | CCUGAAAAAUAGGACAUUU | 2002 | AAAUGUCCUAUUUUUCAGG |
| SIRNA 863 | 863 | CUGAAAAAUAGGACAUUUU | 2003 | AAAAUGUCCUAUUUUUCAG |
| siRNA 864 | 864 | UGAAAAAUAGGACAUUUUU | 2004 | AAAAAUGUCCUAUUUUUCA |
| siRNA 865 | 865 | GAAAAAUAGGACAUUUUUA | 2005 | UAAAAAUGUCCUAUUUUUC |
| siRNA 866 | 866 | AAAAAUAGGACAUUUUUAU | 2006 | AUAAAAAUGUCCUAUUUUU |
| siRNA 867 | 867 | AAAAUAGGACAUUUUUAUU | 2007 | AAUAAAAAUGUCCUAUUUU |
| siRNA 868 | 868 | AAAUAGGACAUUUUUAUUA | 2008 | UAAUAAAAAUGUCCUAUUU |
| siRNA 869 | 869 | AAUAGGACAUUUUUAUUAA | 2009 | UUAAUAAAAAUGUCCUAUU |
| siRNA 870 | 870 | AUAGGACAUUUUUAUUAAA | 2010 | UUUAAUAAAAAUGUCCUAU |
| siRNA 871 | 871 | UAGGACAUUUUUAUUAAAA | 2011 | UUUUAAUAAAAAUGUCCUA |
| siRNA 872 | 872 | AGGACAUUUUUAUUAAAAU | 2012 | AUUUUAAUAAAAAUGUCCU |
| siRNA 873 | 873 | GGACAUUUUUAUUAAAAUA | 2013 | UAUUUUAAUAAAAAUGUCC |
| siRNA 874 | 874 | GACAUUUUUAUUAAAAUAA | 2014 | UUAUUUUAAUAAAAAUGUC |
| siRNA 875 | 875 | ACAUUUUUAUUAAAAUAAA | 2015 | UUUAUUUUAAUAAAAAUGU |
| siRNA 876 | 876 | CAUUUUUAUUAAAAUAAAG | 2016 | CUUUAUUUUAAUAAAAAUG |
| siRNA 877 | 877 | AUUUUUAUUAAAAUAAAGU | 2017 | ACUUUAUUUUAAUAAAAAU |
| siRNA 878 | 878 | UUUUUAUUAAAAUAAAGUU | 2018 | AACUUUAUUUUAAUAAAAA |
| siRNA 879 | 879 | UUUUAUUAAAAUAAAGUUC | 2019 | GAACUUUAUUUUAAUAAAA |
| siRNA 880 | 880 | UUUAUUAAAAUAAAGUUCU | 2020 | AGAACUUUAUUUUAAUAAA |
| siRNA 881 | 881 | UUAUUAAAAUAAAGUUCUC | 2021 | GAGAACUUUAUUUUAAUAA |
| siRNA 882 | 882 | UAUUAAAAUAAAGUUCUCU | 2022 | AGAGAACUUUAUUUUAAUA |
| siRNA 883 | 883 | AUUAAAAUAAAGUUCUCUU | 2023 | AAGAGAACUUUAUUUUAAU |
| siRNA 884 | 884 | UUAAAAUAAAGUUCUCUUA | 2024 | UAAGAGAACUUUAUUUUAA |
| siRNA 885 | 885 | UAAAAUAAAGUUCUCUUAG | 2025 | CUAAGAGAACUUUAUUUUA |
| siRNA 886 | 886 | AAAAUAAAGUUCUCUUAGC | 2026 | GCUAAGAGAACUUUAUUUU |
| siRNA 887 | 887 | AAAUAAAGUUCUCUUAGCG | 2027 | CGCUAAGAGAACUUUAUUU |
| siRNA 888 | 888 | AAUAAAGUUCUCUUAGCGU | 2028 | ACGCUAAGAGAACUUUAUU |
| siRNA 889 | 889 | AUAAAGUUCUCUUAGCGUU | 2029 | AACGCUAAGAGAACUUUAU |
| siRNA 890 | 890 | UAAAGUUCUCUUAGCGUUU | 2030 | AAACGCUAAGAGAACUUUA |
| siRNA 891 | 891 | AAAGUUCUCUUAGCGUUUG | 2031 | CAAACGCUAAGAGAACUUU |
| siRNA 892 | 892 | AAGUUCUCUUAGCGUUUGU | 2032 | ACAAACGCUAAGAGAACUU |
| siRNA 893 | 893 | AGUUCUCUUAGCGUUUGUG | 2033 | CACAAACGCUAAGAGAACU |
| siRNA 894 | 894 | GUUCUCUUAGCGUUUGUGG | 2034 | CCACAAACGCUAAGAGAAC |
| siRNA 895 | 895 | UUCUCUUAGCGUUUGUGGA | 2035 | UCCACAAACGCUAAGAGAA |
| siRNA 896 | 896 | UCUCUUAGCGUUUGUGGAA | 2036 | UUCCACAAACGCUAAGAGA |
| siRNA 897 | 897 | CUCUUAGCGUUUGUGGAAU | 2037 | AUUCCACAAACGCUAAGAG |
| siRNA 898 | 898 | UCUUAGCGUUUGUGGAAUC | 2038 | GAUUCCACAAACGCUAAGA |
| siRNA 899 | 899 | CUUAGCGUUUGUGGAAUCU | 2039 | AGAUUCCACAAACGCUAAG |
| siRNA 900 | 900 | UUAGCGUUUGUGGAAUCUG | 2040 | CAGAUUCCACAAACGCUAA |
| siRNA 901 | 901 | UAGCGUUUGUGGAAUCUGC | 2041 | GCAGAUUCCACAAACGCUA |
| siRNA 902 | 902 | AGCGUUUGUGGAAUCUGCC | 2042 | GGCAGAUUCCACAAACGCU |
| siRNA 903 | 903 | GCGUUUGUGGAAUCUGCCG | 2043 | CGGCAGAUUCCACAAACGC |
| siRNA 904 | 904 | CGUUUGUGGAAUCUGCCGA | 2044 | UCGGCAGAUUCCACAAACG |
| siRNA 905 | 905 | GUUUGUGGAAUCUGCCGAG | 2045 | CUCGGCAGAUUCCACAAAC |
| siRNA 906 | 906 | UUUGUGGAAUCUGCCGAGC | 2046 | GCUCGGCAGAUUCCACAAA |
| siRNA 907 | 907 | UUGUGGAAUCUGCCGAGCC | 2047 | GGCUCGGCAGAUUCCACAA |
| siRNA 908 | 908 | UGUGGAAUCUGCCGAGCCA | 2048 | UGGCUCGGCAGAUUCCACA |
| siRNA 909 | 909 | GUGGAAUCUGCCGAGCCAU | 2049 | AUGGCUCGGCAGAUUCCAC |
| siRNA 910 | 910 | UGGAAUCUGCCGAGCCAUU | 2050 | AAUGGCUCGGCAGAUUCCA |
| siRNA 911 | 911 | GGAAUCUGCCGAGCCAUUU | 2051 | AAAUGGCUCGGCAGAUUCC |
| siRNA 912 | 912 | GAAUCUGCCGAGCCAUUUU | 2052 | AAAAUGGCUCGGCAGAUUC |
| siRNA 913 | 913 | AAUCUGCCGAGCCAUUUUG | 2053 | CAAAAUGGCUCGGCAGAUU |
| siRNA 914 | 914 | AUCUGCCGAGCCAUUUUGU | 2054 | ACAAAAUGGCUCGGCAGAU |
| siRNA 915 | 915 | UCUGCCGAGCCAUUUUGUG | 2055 | CACAAAAUGGCUCGGCAGA |
| siRNA 916 | 916 | CUGCCGAGCCAUUUUGUGG | 2056 | CCACAAAAUGGCUCGGCAG |
| siRNA 917 | 917 | UGCCGAGCCAUUUUGUGGA | 2057 | UCCACAAAAUGGCUCGGCA |
| siRNA 918 | 918 | GCCGAGCCAUUUUGUGGAA | 2058 | UUCCACAAAAUGGCUCGGC |
| siRNA 919 | 919 | CCGAGCCAUUUUGUGGAAA | 2059 | UUUCCACAAAAUGGCUCGG |
| siRNA 920 | 920 | CGAGCCAUUUUGUGGAAAU | 2060 | AUUUCCACAAAAUGGCUCG |
| siRNA 921 | 921 | GAGCCAUUUUGUGGAAAUU | 2061 | AAUUUCCACAAAAUGGCUC |
| siRNA 922 | 922 | AGCCAUUUUGUGGAAAUUG | 2062 | CAAUUUCCACAAAAUGGCU |
| siRNA 923 | 923 | GCCAUUUUGUGGAAAUUGG | 2063 | CCAAUUUCCACAAAAUGGC |
| siRNA 924 | 924 | CCAUUUUGUGGAAAUUGGG | 2064 | CCCAAUUUCCACAAAAUGG |
| siRNA 925 | 925 | CAUUUUGUGGAAAUUGGGA | 2065 | UCCCAAUUUCCACAAAAUG |
| siRNA 926 | 926 | AUUUUGUGGAAAUUGGGAU | 2066 | AUCCCAAUUUCCACAAAAU |
| siRNA 927 | 927 | UUUUGUGGAAAUUGGGAUC | 2067 | GAUCCCAAUUUCCACAAAA |
| siRNA 928 | 928 | UUUGUGGAAAUUGGGAUCC | 2068 | GGAUCCCAAUUUCCACAAA |
| siRNA 929 | 929 | UUGUGGAAAUUGGGAUCCA | 2069 | UGGAUCCCAAUUUCCACAA |
| siRNA 930 | 930 | UGUGGAAAUUGGGAUCCAU | 2070 | AUGGAUCCCAAUUUCCACA |
| siRNA 931 | 931 | GUGGAAAUUGGGAUCCAUA | 2071 | UAUGGAUCCCAAUUUCCAC |
| siRNA 932 | 932 | UGGAAAUUGGGAUCCAUAU | 2072 | AUAUGGAUCCCAAUUUCCA |
| siRNA 933 | 933 | GGAAAUUGGGAUCCAUAUC | 2073 | GAUAUGGAUCCCAAUUUCC |
| siRNA 934 | 934 | GAAAUUGGGAUCCAUAUCU | 2074 | AGAUAUGGAUCCCAAUUUC |
| siRNA 935 | 935 | AAAUUGGGAUCCAUAUCUG | 2075 | CAGAUAUGGAUCCCAAUUU |
| siRNA 936 | 936 | AAUUGGGAUCCAUAUCUGG | 2076 | CCAGAUAUGGAUCCCAAUU |
| siRNA 937 | 937 | AUUGGGAUCCAUAUCUGGA | 2077 | UCCAGAUAUGGAUCCCAAU |
| siRNA 938 | 938 | UUGGGAUCCAUAUCUGGAG | 2078 | CUCCAGAUAUGGAUCCCAA |
| siRNA 939 | 939 | UGGGAUCCAUAUCUGGAGA | 2079 | UCUCCAGAUAUGGAUCCCA |
| siRNA 940 | 940 | GGGAUCCAUAUCUGGAGAC | 2080 | GUCUCCAGAUAUGGAUCCC |
| siRNA 941 | 941 | GGAUCCAUAUCUGGAGACA | 2081 | UGUCUCCAGAUAUGGAUCC |
| siRNA 942 | 942 | GAUCCAUAUCUGGAGACAC | 2082 | GUGUCUCCAGAUAUGGAUC |
| siRNA 943 | 943 | AUCCAUAUCUGGAGACACU | 2083 | AGUGUCUCCAGAUAUGGAU |
| siRNA 944 | 944 | UCCAUAUCUGGAGACACUU | 2084 | AAGUGUCUCCAGAUAUGGA |
| siRNA 945 | 945 | CCAUAUCUGGAGACACUUC | 2085 | GAAGUGUCUCCAGAUAUGG |
| siRNA 946 | 946 | CAUAUCUGGAGACACUUCC | 2086 | GGAAGUGUCUCCAGAUAUG |
| siRNA 947 | 947 | AUAUCUGGAGACACUUCCC | 2087 | GGGAAGUGUCUCCAGAUAU |
| siRNA 948 | 948 | UAUCUGGAGACACUUCCCA | 2088 | UGGGAAGUGUCUCCAGAUA |
| siRNA 949 | 949 | AUCUGGAGACACUUCCCAA | 2089 | UUGGGAAGUGUCUCCAGAU |
| siRNA 950 | 950 | UCUGGAGACACUUCCCAAG | 2090 | CUUGGGAAGUGUCUCCAGA |
| siRNA 951 | 951 | CUGGAGACACUUCCCAAGG | 2091 | CCUUGGGAAGUGUCUCCAG |
| siRNA 952 | 952 | UGGAGACACUUCCCAAGGC | 2092 | GCCUUGGGAAGUGUCUCCA |
| siRNA 953 | 953 | GGAGACACUUCCCAAGGCC | 2093 | GGCCUUGGGAAGUGUCUCC |
| siRNA 954 | 954 | GAGACACUUCCCAAGGCCU | 2094 | AGGCCUUGGGAAGUGUCUC |
| siRNA 955 | 955 | AGACACUUCCCAAGGCCUG | 2095 | CAGGCCUUGGGAAGUGUCU |
| siRNA 956 | 956 | GACACUUCCCAAGGCCUGC | 2096 | GCAGGCCUUGGGAAGUGUC |
| siRNA 957 | 957 | ACACUUCCCAAGGCCUGCC | 2097 | GGCAGGCCUUGGGAAGUGU |
| siRNA 958 | 958 | CACUUCCCAAGGCCUGCCU | 2098 | AGGCAGGCCUUGGGAAGUG |
| siRNA 959 | 959 | ACUUCCCAAGGCCUGCCUC | 2099 | GAGGCAGGCCUUGGGAAGU |
| siRNA 960 | 960 | CUUCCCAAGGCCUGCCUCA | 2100 | UGAGGCAGGCCUUGGGAAG |
| siRNA 961 | 961 | UUCCCAAGGCCUGCCUCAC | 2101 | GUGAGGCAGGCCUUGGGAA |
| siRNA 962 | 962 | UCCCAAGGCCUGCCUCACC | 2102 | GGUGAGGCAGGCCUUGGGA |
| siRNA 963 | 963 | CCCAAGGCCUGCCUCACCU | 2103 | AGGUGAGGCAGGCCUUGGG |
| siRNA 964 | 964 | CCAAGGCCUGCCUCACCUC | 2104 | GAGGUGAGGCAGGCCUUGG |
| siRNA 965 | 965 | CAAGGCCUGCCUCACCUCC | 2105 | GGAGGUGAGGCAGGCCUUG |
| siRNA 966 | 966 | AAGGCCUGCCUCACCUCCA | 2106 | UGGAGGUGAGGCAGGCCUU |
| siRNA 967 | 967 | AGGCCUGCCUCACCUCCAC | 2107 | GUGGAGGUGAGGCAGGCCU |
| siRNA 968 | 968 | GGCCUGCCUCACCUCCACC | 2108 | GGUGGAGGUGAGGCAGGCC |
| siRNA 969 | 969 | GCCUGCCUCACCUCCACCC | 2109 | GGGUGGAGGUGAGGCAGGC |
| siRNA 970 | 970 | CCUGCCUCACCUCCACCCC | 2110 | GGGGUGGAGGUGAGGCAGG |
| siRNA 971 | 971 | CUGCCUCACCUCCACCCCC | 2111 | GGGGGUGGAGGUGAGGCAG |
| siRNA 972 | 972 | UGCCUCACCUCCACCCCCU | 2112 | AGGGGGUGGAGGUGAGGCA |
| siRNA 973 | 973 | GCCUCACCUCCACCCCCUG | 2113 | CAGGGGGUGGAGGUGAGGC |
| siRNA 974 | 974 | CCUCACCUCCACCCCCUGC | 2114 | GCAGGGGGUGGAGGUGAGG |
| siRNA 975 | 975 | CUCACCUCCACCCCCUGCC | 2115 | GGCAGGGGGUGGAGGUGAG |
| siRNA 976 | 976 | UCACCUCCACCCCCUGCCC | 2116 | GGGCAGGGGGUGGAGGUGA |
| siRNA 977 | 977 | CACCUCCACCCCCUGCCCA | 2117 | UGGGCAGGGGGUGGAGGUG |
| siRNA 978 | 978 | ACCUCCACCCCCUGCCCAC | 2118 | GUGGGCAGGGGGUGGAGGU |
| siRNA 979 | 979 | CCUCCACCCCCUGCCCACC | 2119 | GGUGGGCAGGGGGUGGAGG |
| siRNA 980 | 980 | CUCCACCCCCUGCCCACCU | 2120 | AGGUGGGCAGGGGGUGGAG |
| siRNA 981 | 981 | UCCACCCCCUGCCCACCUU | 2121 | AAGGUGGGCAGGGUGUGGA |
| siRNA 982 | 982 | CCACCCCCUGCCCACCUUG | 2122 | CAAGGUGGGCAGGGGGUGG |
| siRNA 983 | 983 | CACCCCCUGCCCACCUUGA | 2123 | UCAAGGUGGGCAGGGGGUG |
| siRNA 984 | 984 | ACCCCCUGCCCACCUUGAU | 2124 | AUCAAGGUGGGCAGGGGGU |
| siRNA 985 | 985 | CCCCCUGCCCACCUUGAUC | 2125 | GAUCAAGGUGGGCAGGGGG |
| siRNA 986 | 986 | CCCCUGCCCACCUUGAUCC | 2126 | GGAUCAAGGUGGGCAGGGG |
| siRNA 987 | 987 | CCCUGCCCACCUUGAUCCA | 2127 | UGGAUCAAGGUGGGCAGGG |
| siRNA 988 | 988 | CCUGCCCACCUUGAUCCAU | 2128 | AUGGAUCAAGGUGGGCAGG |
| siRNA 989 | 989 | CUGCCCACCUUGAUCCAUG | 2129 | CAUGGAUCAAGGUGGGCAG |
| siRNA 990 | 990 | UGCCCACCUUGAUCCAUGC | 2130 | GCAUGGAUCAAGGUGGGCA |
| siRNA 991 | 991 | GCCCACCUUGAUCCAUGCU | 2131 | AGCAUGGAUCAAGGUGGGC |
| siRNA 992 | 992 | CCCACCUUGAUCCAUGCUC | 2132 | GAGCAUGGAUCAAGGUGGG |
| siRNA 993 | 993 | CCACCUUGAUCCAUGCUCC | 2133 | GGAGCAUGGAUCAAGGUGG |
| siRNA 994 | 994 | CACCUUGAUCCAUGCUCCU | 2134 | AGGAGCAUGGAUCAAGGUG |
| siRNA 995 | 995 | ACCUUGAUCCAUGCUCCUU | 2135 | AAGGAGCAUGGAUCAAGGU |
| siRNA 996 | 996 | CCUUGAUCCAUGCUCCUUU | 2136 | AAAGGAGCAUGGAUCAAGG |
| siRNA 997 | 997 | CUUGAUCCAUGCUCCUUUG | 2137 | CAAAGGAGCAUGGAUCAAG |
| siRNA 998 | 998 | UUGAUCCAUGCUCCUUUGA | 2138 | UCAAAGGAGCAUGGAUCAA |
| siRNA 999 | 999 | UGAUCCAUGCUCCUUUGAC | 2139 | GUCAAAGGAGCAUGGAUCA |
| siRNA 1000 | 1000 | GAUCCAUGCUCCUUUGACC | 2140 | GGUCAAAGGAGCAUGGAUC |
| siRNA 1001 | 1001 | AUCCAUGCUCCUUUGACCU | 2141 | AGGUCAAAGGAGCAUGGAU |
| siRNA 1002 | 1002 | UCCAUGCUCCUUUGACCUC | 2142 | GAGGUCAAAGGAGCAUGGA |
| siRNA 1003 | 1003 | CCAUGCUCCUUUGACCUCC | 2143 | GGAGGUCAAAGGAGCAUGG |
| siRNA 1004 | 1004 | CAUGCUCCUUUGACCUCCU | 2144 | AGGAGGUCAAAGGAGCAUG |
| siRNA 1005 | 1005 | AUGCUCCUUUGACCUCCUC | 2145 | GAGGAGGUCAAAGGAGCAU |
| siRNA 1006 | 1006 | UGCUCCUUUGACCUCCUCG | 2146 | CGAGGAGGUCAAAGGAGCA |
| siRNA 1007 | 1007 | GCUCCUUUGACCUCCUCGU | 2147 | ACGAGGAGGUCAAAGGAGC |
| siRNA 1008 | 1008 | CUCCUUUGACCUCCUCGUG | 2148 | CACGAGGAGGUCAAAGGAG |
| siRNA 1009 | 1009 | UCCUUUGACCUCCUCGUGU | 2149 | ACACGAGGAGGUCAAAGGA |
| siRNA 1010 | 1010 | CCUUUGACCUCCUCGUGUG | 2150 | CACACGAGGAGGUCAAAGG |
| siRNA 1011 | 1011 | CUUUGACCUCCUCGUGUGA | 2151 | UCACACGAGGAGGUCAAAG |
| siRNA 1012 | 1012 | UUUGACCUCCUCGUGUGAG | 2152 | CUCACACGAGGAGGUCAAA |
| siRNA 1013 | 1013 | UUGACCUCCUCGUGUGAGA | 2153 | UCUCACACGAGGAGGUCAA |
| siRNA 1014 | 1014 | UGACCUCCUCGUGUGAGAA | 2154 | UUCUCACACGAGGAGGUCA |
| siRNA 1015 | 1015 | GACCUCCUCGUGUGAGAAC | 2155 | GUUCUCACACGAGGAGGUC |
| SIRNA 1016 | 1016 | ACCUCCUCGUGUGAGAACC | 2156 | GGUUCUCACACGAGGAGGU |
| siRNA 1017 | 1017 | CCUCCUCGUGUGAGAACCC | 2157 | GGGUUCUCACACGAGGAGG |
| siRNA 1018 | 1018 | CUCCUCGUGUGAGAACCCC | 2158 | GGGGUUCUCACACGAGGAG |
| SIRNA 1019 | 1019 | UCCUCGUGUGAGAACCCCU | 2159 | AGGGGUUCUCACACGAGGA |
| siRNA 1020 | 1020 | CCUCGUGUGAGAACCCCUU | 2160 | AAGGGGUUCUCACACGAGG |
| siRNA 1021 | 1021 | CUCGUGUGAGAACCCCUUU | 2161 | AAAGGGGUUCUCACACGAG |
| siRNA 1022 | 1022 | UCGUGUGAGAACCCCUUUG | 2162 | CAAAGGGGUUCUCACACGA |
| siRNA 1023 | 1023 | CGUGUGAGAACCCCUUUGC | 2163 | GCAAAGGGGUUCUCACACG |
| siRNA 1024 | 1024 | GUGUGAGAACCCCUUUGCC | 2164 | GGCAAAGGGGUUCUCACAC |
| siRNA 1025 | 1025 | UGUGAGAACCCCUUUGCCA | 2165 | UGGCAAAGGGGUUCUCACA |
| siRNA 1026 | 1026 | GUGAGAACCCCUUUGCCAG | 2166 | CUGGCAAAGGGGUUCUCAC |
| siRNA 1027 | 1027 | UGAGAACCCCUUUGCCAGA | 2167 | UCUGGCAAAGGGGUUCUCA |
| siRNA 1028 | 1028 | GAGAACCCCUUUGCCAGAG | 2168 | CUCUGGCAAAGGGGUUCUC |
| siRNA 1029 | 1029 | AGAACCCCUUUGCCAGAGU | 2169 | ACUCUGGCAAAGGGGUUCU |
| siRNA 1030 | 1030 | GAACCCCUUUGCCAGAGUG | 2170 | CACUCUGGCAAAGGGGUUC |
| siRNA 1031 | 1031 | AACCCCUUUGCCAGAGUGA | 2171 | UCACUCUGGCAAAGGGGUU |
| siRNA 1032 | 1032 | ACCCCUUUGCCAGAGUGAG | 2172 | CUCACUCUGGCAAAGGGGU |
| siRNA 1033 | 1033 | CCCCUUUGCCAGAGUGAGA | 2173 | UCUCACUCUGGCAAAGGGG |
| siRNA 1034 | 1034 | CCCUUUGCCAGAGUGAGAC | 2174 | GUCUCACUCUGGCAAAGGG |
| siRNA 1035 | 1035 | CCUUUGCCAGAGUGAGACG | 2175 | CGUCUCACUCUGGCAAAGG |
| siRNA 1036 | 1036 | CUUUGCCAGAGUGAGACGU | 2176 | ACGUCUCACUCUGGCAAAG |
| siRNA 1037 | 1037 | UUUGCCAGAGUGAGACGUG | 2177 | CACGUCUCACUCUGGCAAA |
| siRNA 1038 | 1038 | UUGCCAGAGUGAGACGUGU | 2178 | ACACGUCUCACUCUGGCAA |
| SIRNA 1039 | 1039 | UGCCAGAGUGAGACGUGUG | 2179 | CACACGUCUCACUCUGGCA |
| siRNA 1040 | 1040 | GCCAGAGUGAGACGUGUGC | 2180 | GCACACGUCUCACUCUGGC |
| SiRNA 1041 | 1041 | CCAGAGUGAGACGUGUGCA | 2181 | UGCACACGUCUCACUCUGG |
| siRNA 1042 | 1042 | CAGAGUGAGACGUGUGCAG | 2182 | CUGCACACGUCUCACUCUG |
| siRNA 1043 | 1043 | AGAGUGAGACGUGUGCAGA | 2183 | UCUGCACACGUCUCACUCU |
| siRNA 1044 | 1044 | GAGUGAGACGUGUGCAGAA | 2184 | UUCUGCACACGUCUCACUC |
| siRNA 1045 | 1045 | AGUGAGACGUGUGCAGAAU | 2185 | AUUCUGCACACGUCUCACU |
| siRNA 1046 | 1046 | GUGAGACGUGUGCAGAAUG | 2186 | CAUUCUGCACACGUCUCAC |
| siRNA 1047 | 1047 | UGAGACGUGUGCAGAAUGA | 2187 | UCAUUCUGCACACGUCUCA |
| siRNA 1048 | 1048 | GAGACGUGUGCAGAAUGAA | 2188 | UUCAUUCUGCACACGUCUC |
| siRNA 1049 | 1049 | AGACGUGUGCAGAAUGAAC | 2189 | GUUCAUUCUGCACACGUCU |
| siRNA 1050 | 1050 | GACGUGUGCAGAAUGAACU | 2190 | AGUUCAUUCUGCACACGUC |
| siRNA 1051 | 1051 | ACGUGUGCAGAAUGAACUA | 2191 | UAGUUCAUUCUGCACACGU |
| siRNA 1052 | 1052 | CGUGUGCAGAAUGAACUAA | 2192 | UUAGUUCAUUCUGCACACG |
| siRNA 1053 | 1053 | GUGUGCAGAAUGAACUAAG | 2193 | CUUAGUUCAUUCUGCACAC |
| siRNA 1054 | 1054 | UGUGCAGAAUGAACUAAGC | 2194 | GCUUAGUUCAUUCUGCACA |
| siRNA 1055 | 1055 | GUGCAGAAUGAACUAAGCC | 2195 | GGCUUAGUUCAUUCUGCAC |
| siRNA 1056 | 1056 | UGCAGAAUGAACUAAGCCC | 2196 | GGGCUUAGUUCAUUCUGCA |
| siRNA 1057 | 1057 | GCAGAAUGAACUAAGCCCC | 2197 | GGGGCUUAGUUCAUUCUGC |
| siRNA 1058 | 1058 | CAGAAUGAACUAAGCCCCA | 2198 | UGGGGCUUAGUUCAUUCUG |
| siRNA 1059 | 1059 | AGAAUGAACUAAGCCCCAG | 2199 | CUGGGGCUUAGUUCAUUCU |
| siRNA 1060 | 1060 | GAAUGAACUAAGCCCCAGA | 2200 | UCUGGGGCUUAGUUCAUUC |
| siRNA 1061 | 1061 | AAUGAACUAAGCCCCAGAG | 2201 | CUCUGGGGCUUAGUUCAUU |
| siRNA 1062 | 1062 | AUGAACUAAGCCCCAGAGG | 2202 | CCUCUGGGGCUUAGUUCAU |
| siRNA 1063 | 1063 | UGAACUAAGCCCCAGAGGG | 2203 | CCCUCUGGGGCUUAGUUCA |
| siRNA 1064 | 1064 | GAACUAAGCCCCAGAGGGU | 2204 | ACCCUCUGGGGCUUAGUUC |
| siRNA 1065 | 1065 | AACUAAGCCCCAGAGGGUU | 2205 | AACCCUCUGGGGCUUAGUU |
| siRNA 1066 | 1066 | ACUAAGCCCCAGAGGGUUU | 2206 | AAACCCUCUGGGGCUUAGU |
| siRNA 1067 | 1067 | CUAAGCCCCAGAGGGUUUU | 2207 | AAAACCCUCUGGGGCUUAG |
| siRNA 1068 | 1068 | UAAGCCCCAGAGGGUUUUA | 2208 | UAAAACCCUCUGGGGCUUA |
| siRNA 1069 | 1069 | AAGCCCCAGAGGGUUUUAA | 2209 | UUAAAACCCUCUGGGGCUU |
| siRNA 1070 | 1070 | AGCCCCAGAGGGUUUUAAU | 2210 | AUUAAAACCCUCUGGGGCU |
| siRNA 1071 | 1071 | GCCCCAGAGGGUUUUAAUG | 2211 | CAUUAAAACCCUCUGGGGC |
| siRNA 1072 | 1072 | CCCCAGAGGGUUUUAAUGG | 2212 | CCAUUAAAACCCUCUGGGG |
| siRNA 1073 | 1073 | CCCAGAGGGUUUUAAUGGC | 2213 | GCCAUUAAAACCCUCUGGG |
| siRNA 1074 | 1074 | CCAGAGGGUUUUAAUGGCU | 2214 | AGCCAUUAAAACCCUCUGG |
| siRNA 1075 | 1075 | CAGAGGGUUUUAAUGGCUU | 2215 | AAGCCAUUAAAACCCUCUG |
| siRNA 1076 | 1076 | AGAGGGUUUUAAUGGCUUG | 2216 | CAAGCCAUUAAAACCCUCU |
| siRNA 1077 | 1077 | GAGGGUUUUAAUGGCUUGC | 2217 | GCAAGCCAUUAAAACCCUC |
| siRNA 1078 | 1078 | AGGGUUUUAAUGGCUUGCC | 2218 | GGCAAGCCAUUAAAACCCU |
| siRNA 1079 | 1079 | GGGUUUUAAUGGCUUGCCU | 2219 | AGGCAAGCCAUUAAAACCC |
| siRNA 1080 | 1080 | GGUUUUAAUGGCUUGCCUG | 2220 | CAGGCAAGCCAUUAAAACC |
| siRNA 1081 | 1081 | GUUUUAAUGGCUUGCCUGC | 2221 | GCAGGCAAGCCAUUAAAAC |
| SiRNA 1082 | 1082 | UUUUAAUGGCUUGCCUGCU | 2222 | AGCAGGCAAGCCAUUAAAA |
| siRNA 1083 | 1083 | UUUAAUGGCUUGCCUGCUG | 2223 | CAGCAGGCAAGCCAUUAAA |
| siRNA 1084 | 1084 | UUAAUGGCUUGCCUGCUGU | 2224 | ACAGCAGGCAAGCCAUUAA |
| siRNA 1085 | 1085 | UAAUGGCUUGCCUGCUGUU | 2225 | AACAGCAGGCAAGCCAUUA |
| siRNA 1086 | 1086 | AAUGGCUUGCCUGCUGUUU | 2226 | AAACAGCAGGCAAGCCAUU |
| siRNA 1087 | 1087 | AUGGCUUGCCUGCUGUUUC | 2227 | GAAACAGCAGGCAAGCCAU |
| siRNA 1088 | 1088 | UGGCUUGCCUGCUGUUUCC | 2228 | GGAAACAGCAGGCAAGCCA |
| siRNA 1089 | 1089 | GGCUUGCCUGCUGUUUCCC | 2229 | GGGAAACAGCAGGCAAGCC |
| siRNA 1090 | 1090 | GCUUGCCUGCUGUUUCCCA | 2230 | UGGGAAACAGCAGGCAAGC |
| siRNA 1091 | 1091 | CUUGCCUGCUGUUUCCCAC | 2231 | GUGGGAAACAGCAGGCAAG |
| siRNA 1092 | 1092 | UUGCCUGCUGUUUCCCACA | 2232 | UGUGGGAAACAGCAGGCAA |
| siRNA 1093 | 1093 | UGCCUGCUGUUUCCCACAU | 2233 | AUGUGGGAAACAGCAGGCA |
| siRNA 1094 | 1094 | GCCUGCUGUUUCCCACAUA | 2234 | UAUGUGGGAAACAGCAGGC |
| siRNA 1095 | 1095 | CCUGCUGUUUCCCACAUAA | 2235 | UUAUGUGGGAAACAGCAGG |
| siRNA 1096 | 1096 | CUGCUGUUUCCCACAUAAA | 2236 | UUUAUGUGGGAAACAGCAG |
| siRNA 1097 | 1097 | UGCUGUUUCCCACAUAAAC | 2237 | GUUUAUGUGGGAAACAGCA |
| siRNA 1098 | 1098 | GCUGUUUCCCACAUAAACU | 2238 | AGUUUAUGUGGGAAACAGC |
| siRNA 1099 | 1099 | CUGUUUCCCACAUAAACUA | 2239 | UAGUUUAUGUGGGAAACAG |
| siRNA 1100 | 1100 | UGUUUCCCACAUAAACUAC | 2240 | GUAGUUUAUGUGGGAAACA |
| siRNA 1101 | 1101 | GUUUCCCACAUAAACUACC | 2241 | GGUAGUUUAUGUGGGAAAC |
| siRNA 1102 | 1102 | UUUCCCACAUAAACUACCU | 2242 | AGGUAGUUUAUGUGGGAAA |
| siRNA 1103 | 1103 | UUCCCACAUAAACUACCUC | 2243 | GAGGUAGUUUAUGUGGGAA |
| siRNA 1104 | 1104 | UCCCACAUAAACUACCUCA | 2244 | UGAGGUAGUUUAUGUGGGA |
| siRNA 1105 | 1105 | CCCACAUAAACUACCUCAG | 2245 | CUGAGGUAGUUUAUGUGGG |
| SiRNA 1106 | 1106 | CCACAUAAACUACCUCAGG | 2246 | CCUGAGGUAGUUUAUGUGG |
| siRNA 1107 | 1107 | CACAUAAACUACCUCAGGA | 2247 | UCCUGAGGUAGUUUAUGUG |
| siRNA 1108 | 1108 | ACAUAAACUACCUCAGGAG | 2248 | CUCCUGAGGUAGUUUAUGU |
| siRNA 1109 | 1109 | CAUAAACUACCUCAGGAGU | 2249 | ACUCCUGAGGUAGUUUAUG |
| siRNA 1110 | 1110 | AUAAACUACCUCAGGAGUC | 2250 | GACUCCUGAGGUAGUUUAU |
| siRNA 1111 | 1111 | UAAACUACCUCAGGAGUCA | 2251 | UGACUCCUGAGGUAGUUUA |
| SIRNA 1112 | 1112 | AAACUACCUCAGGAGUCAC | 2252 | GUGACUCCUGAGGUAGUUU |
| siRNA 1113 | 1113 | AACUACCUCAGGAGUCACU | 2253 | AGUGACUCCUGAGGUAGUU |
| siRNA 1114 | 1114 | ACUACCUCAGGAGUCACUG | 2254 | CAGUGACUCCUGAGGUAGU |
| siRNA 1115 | 1115 | CUACCUCAGGAGUCACUGU | 2255 | ACAGUGACUCCUGAGGUAG |
| siRNA 1116 | 1116 | UACCUCAGGAGUCACUGUA | 2256 | UACAGUGACUCCUGAGGUA |
| siRNA 1117 | 1117 | ACCUCAGGAGUCACUGUAA | 2257 | UUACAGUGACUCCUGAGGU |
| siRNA 1118 | 1118 | CCUCAGGAGUCACUGUAAA | 2258 | UUUACAGUGACUCCUGAGG |
| siRNA 1119 | 1119 | CUCAGGAGUCACUGUAAAA | 2259 | UUUUACAGUGACUCCUGAG |
| siRNA 1120 | 1120 | UCAGGAGUCACUGUAAAAU | 2260 | AUUUUACAGUGACUCCUGA |
| siRNA 1121 | 1121 | CAGGAGUCACUGUAAAAUA | 2261 | UAUUUUACAGUGACUCCUG |
| siRNA 1122 | 1122 | AGGAGUCACUGUAAAAUAA | 2262 | UUAUUUUACAGUGACUCCU |
| siRNA 1123 | 1123 | GGAGUCACUGUAAAAUAAA | 2263 | UUUAUUUUACAGUGACUCC |
| siRNA 1124 | 1124 | GAGUCACUGUAAAAUAAAC | 2264 | GUUUAUUUUACAGUGACUC |
| siRNA 1125 | 1125 | AGUCACUGUAAAAUAAACU | 2265 | AGUUUAUUUUACAGUGACU |
| siRNA 1126 | 1126 | GUCACUGUAAAAUAAACUG | 2266 | CAGUUUAUUUUACAGUGAC |
| siRNA 1127 | 1127 | UCACUGUAAAAUAAACUGG | 2267 | CCAGUUUAUUUUACAGUGA |
| siRNA 1128 | 1128 | CACUGUAAAAUAAACUGGC | 2268 | GCCAGUUUAUUUUACAGUG |
| siRNA 1129 | 1129 | ACUGUAAAAUAAACUGGCC | 2269 | GGCCAGUUUAUUUUACAGU |
| siRNA 1130 | 1130 | CUGUAAAAUAAACUGGCCU | 2270 | AGGCCAGUUUAUUUUACAG |
| siRNA 1131 | 1131 | UGUAAAAUAAACUGGCCUU | 2271 | AAGGCCAGUUUAUUUUACA |
| siRNA 1132 | 1132 | GUAAAAUAAACUGGCCUUG | 2272 | CAAGGCCAGUUUAUUUUAC |
| siRNA 1133 | 1133 | UAAAAUAAACUGGCCUUGU | 2273 | ACAAGGCCAGUUUAUUUUA |
| siRNA 1134 | 1134 | AAAAUAAACUGGCCUUGUU | 2274 | AACAAGGCCAGUUUAUUUU |
| siRNA 1135 | 1135 | AAAUAAACUGGCCUUGUUG | 2275 | CAACAAGGCCAGUUUAUUU |
| siRNA 1136 | 1136 | AAUAAACUGGCCUUGUUGU | 2276 | ACAACAAGGCCAGUUUAUU |
| siRNA 1137 | 1137 | AUAAACUGGCCUUGUUGUC | 2277 | GACAACAAGGCCAGUUUAU |
| siRNA 1138 | 1138 | UAAACUGGCCUUGUUGUCU | 2278 | AGACAACAAGGCCAGUUUA |
| siRNA 1139 | 1139 | AAACUGGCCUUGUUGUCUU | 2279 | AAGACAACAAGGCCAGUUU |
| siRNA 1140 | 1140 | AACUGGCCUUGUUGUCUUA | 2280 | UAAGACAACAAGGCCAGUU |

TABLE 103
Additional Sequences

| SEQ ID | |
|---|---|
| NO: | 5′ to 3′ Sequence |
| 2443 | GGGGGGGGAGGGAGCGAGAGGAATCCGACCCTGTC |
| | TCAGCCCACAGCCTCCGAGGTCTCCAAGTAAAGGG |
| | AAGGATCTTTAGCTGCATTAGACTTCAAAGCGTTT |
| | AGACCAGTTTCTCCATCTTACGGAGCGGTGAACGG |
| | GCTCAGGAATGTGGAGCGTTTCCTGGCGTCAAGCA |
| | GGTCAAAGTCAGCGCTGCTTTTTTTACAGACACTG |
| | CTTTTCTTACAGTCTTCGACTATAAACTCTACAAG |
| | AATAGGAATCTTCGTATTTTTTTCCTCTGCTGAAT |
| | TCCTAGTGCCCAGATTAGTGCTTGGCACATGATTA |
| | TAAGCGCCATGGCTATGGCTAGTGTTAAATTGCTT |
| | GCCGGTGTTTTAAGAAAGCCAGATGCCTGGATTGG |
| | ACTCTGGGGTGTTCTCCGAGGGACACCTTCATCAT |
| | ACAAACTCTGTACTTCCTGGAATCGATACTTGTAT |
| | TTTTCTAGTACCAAGTTACGTGCACCAAATTATAA |
| | AACACTTTTTTATAATATTTTCTCACTGAGACTCC |
| | CAGGGCTTTTACTATCTCCAGAATGTATTTTTCCT |
| | TTTTCCGTAAGACTCAAAAGTAATATAAGGTCTAC |
| | AAAATCTACTAAAAAGTCTCTGCAAAAAGTAGATG |
| | AAGAGGACTCTGATGAAGAAAGCCATCATGATGAG |
| | ATGAGTGAGCAGGAAGAGGAGCTTGAGGATGATCC |
| | TACTGTAGTCAAAAACTATAAAGACCTGGAAAAAG |
| | CAGTTCAGTCTTTTCGGTATGATGTTGTCCTGAAG |
| | ACGGGGCTAGATATTGGGAGAAACAAAGTGGAAGA |
| | TGCTTTCTACAAAGGTGAACTCAGGCTGAATGAGG |
| | AAAAATTATGGAAGAAAAGCAGAACGGTGAAAGTG |
| | GGAGATACATTGGATCTTCTCATTGGAGAGGATAA |
| | AGAAGCAGGAACAGAGACAGTTATGCGGATTCTCT |
| | TGAAAAAAGTGTTTGAAGAGAAGACTGAAAGTGAA |
| | AAATACAGAGTGGTGTTACGGCGGTGGAAAAGTTT |
| | AAAGTTGCCTAAGAAGAGAATGTCTAAATAAATGG |
| | ATTGCTTTTTAGCAATAGAGCTGCTTTCTAGTGGT |
| | AAAGGAAGGGGTCACCTGAAAAATAGGACATTTTT |
| | ATTAAAATAAAGTTCTCTTAGCGTT |
| 2462 | GGGGTGGGGAGGGAGCGAGAGGAATCCGACCCTGT |
| | CTCAGCCCACAGCCTCCGAGGTCTCCAAGTAAAGG |
| | GAAGGATCTTTAGCTGCATTAGACTTCAAAGCGTT |
| | TAGACCAGTTTCTCCATCTTACGGAGCGGTGAACG |
| | GGCTCAGGAATGTGGAGCGTTTCCTGGCGTCAAGC |
| | AGGTCAAAGTCAGCGCTGCTTTTTTTACAGACACT |
| | GCTTTTCTTACAGTCTTCGACTATAAACTCTACAA |
| | GAATAGGAATCTTCGTATTTTTTTCCTCTGCTGAA |
| | TTCCTAGTGCCCAGATTAGTGCTTGGCACATGATT |
| | ATAAGCGCCATGGCTATGGCTAGTGTTAAATTGCT |
| | TGCCGGTGTTTTAAGAAAGCCAGATGCCTGGATTG |
| | GACTCTGGGGTGTTCTCCGAGGGACACCTTCATCA |
| | TACAAACTCTGTACTTCCTGGAATCGATACTTGTA |
| | TTTTTCTAGTACCAAGTTACGTGCACCAAATTATA |
| | AAACACTTTTTTATAATATTTTCTCACTGAGACTC |
| | CCAGGGCTTTTACTATCTCCAGAATGTATTTTTCC |
| | TTTTTCCGTAAGACTCAAAAGTAATATAAGGTCTA |
| | CAAAATCTACTAAAAAGTCTCTGCAAAAAGTAGAT |
| | GAAGAGGACTCTGATGAAGAAAGCCATCATGATGA |
| | GATGAGTGAGCAGGAAGAGGAGCTTGAGGATGATC |
| | CTACTGTAGTCAAAAACTATAAAGACCTGGAAAAA |
| | GCAGTTCAGTCTTTTCGGTATGATGTTGTCCTGAA |
| | GACGGGGCTAGATATTGGGAGAAACAAAGTGGAAG |
| | ATGCTTTCTACAAAGGTGAACTCAGGCTGAATGAG |
| | GAAAAATTATGGAAGAAAAGCAGAACGGTGAAAGT |
| | GGGAGATACATTGGATCTTCTCATTGGAGAGGATA |
| | AAGAAGCAGGAACAGAGACAGTTATGCGGATTCTC |
| | TTGAAAAAAGTGTTTGAAGAGAAGACTGAAAGTGA |
| | AAAATACAGAGTGGTGTTACGGCGGTGGAAAAGTT |
| | TAAAGTTGCCTAAGAAGAGAATGTCTAAATAAATG |
| | GATTGCTTTTTAGCAATAGAGCTGCTTTCTAGTGG |
| | TAAAGGAAGGGGTCACCTGAAAAATAGGACATTTT |
| | TATTAAAATAAAGTTCTCTTAGCGTT |

What is claimed is:

1. A composition comprising an oligonucleotide that targets MTRES1 and when administered to a subject in an effective amount decreases central nervous system (CNS) MTRES1, wherein the oligonucleotide comprises any one of SEQ ID NOS: 2675, 2677-2686, 2689, 2720, 2729, 2739, 2745, 2748, 2749, 2754, 2758-2762, 2766, 2767, 2769, 2770, 2786, 2787-2812, 2814-2816, 2819-2822, 2824, 2828-2833, 2836, 2838, 2839, 2857, 2859-2868, 2871, 2873, 2874, 2877-2879, 2940-2944, 2948-2952, 2968-2994, 2996-2998, 3001-3004, 3006, 3010, 3011, 3013-3015, 3018, or 3020.

2. The composition of claim 1, wherein the oligonucleotide comprises a modified internucleoside linkage.

3. The composition of claim 2, wherein the modified internucleoside linkage comprises alkylphosphonate, phosphorothioate, methylphosphonate, phosphorodithioate, alkylphosphonothioate, phosphoramidate, carbamate, carbonate, phosphate triester, acetamidate, or carboxymethyl ester, or a combination thereof.

4. The composition of claim 2, wherein the modified internucleoside linkage comprises one or more phosphorothioate linkages.

5. The composition of any one of the preceding claims, wherein the oligonucleotide comprises 1, 2, 3, 4, 5, 6, 7, 8, 9, 10, 11, 12, 13, 14, 15, 16, 17, 18, 19, or 20 modified internucleoside linkages.

6. The composition of any one of the preceding claims, wherein the oligonucleotide comprises a modified nucleoside.

7. The composition of claim 6, wherein the modified nucleoside comprises a locked nucleic acid (LNA), hexitol nucleic acid (HNA), cyclohexene nucleic acid (CeNA), 2′-O-methoxyethyl, 2′-O-alkyl, 2′-O-allyl, 2′-O-allyl, 2′-fluoro, 2′-deoxy, or 2′-O-methyl inosine, or a combination thereof.

8. The composition of claim 7, wherein the modified nucleoside comprises an LNA.

9. The composition of claim 7, wherein the modified nucleoside comprises a 2′,4′ constrained ethyl nucleic acid.

10. The composition of claim 7, wherein the modified nucleoside comprises a 2′-O-methyl nucleoside, 2′-deoxyfluoro nucleoside, 2′-O—N-methylacetamido (2′-O-NMA) nucleoside, a 2′-O-dimethylaminoethoxyethyl(2′-O-DMAEOE) nucleoside, 2′-O-aminopropyl(2′-O-AP) nucleoside, or 2′-ara-F, or a combination thereof.

11. The composition of claim 7, wherein the modified nucleoside comprises one or more 2′-fluoro modified nucleosides.

12. The composition of claim 7, wherein the modified nucleoside comprises a 2′-O-alkyl modified nucleoside.

13. The composition of any one of the preceding claims, wherein the oligonucleotide comprises 1, 2, 3, 4, 5, 6, 7, 8, 9, 10, 11, 12, 13, 14, 15, 16, 17, 18, 19, 20, or 21 modified nucleosides.

14. The composition of claim any one of the preceding claims, wherein the oligonucleotide comprises a lipophilic moiety attached at a 3′ or 5′ terminus of the oligonucleotide.

15. The composition of claim 14, wherein the lipophilic moiety comprises cholesterol, retinoic acid, cholic acid, adamantane acetic acid, 1-pyrene butyric acid, dihydrotestosterone, 1,3-bis-O(hexadecyl)glycerol, geranyloxyhexyanol, hexadecylglycerol, borneol, menthol, 1,3-propanediol, heptadecyl, palmitic acid, myristic acid, O3-(oleoyl) lithocholic acid, O3-(oleoyl) cholenic acid, ibuprofen, naproxen, dimethoxytrityl, or phenoxazine.

16. The composition of claim 14, wherein the lipophilic moiety comprises a C₄-C₃₀ hydrocarbon chain.

17. The composition of claim 14, wherein the lipophilic moiety comprises a lipid.

18. The composition of claim 17, wherein the lipid comprises myristoyl, palmitoyl, stearoyl, lithocholoyl, docosanoyl, docosahexaenoyl, myristyl, palmityl stearyl, α-tocopherol, or a combination thereof.

19. The composition of any one of the preceding claims, wherein the oligonucleotide comprises a small interfering RNA (siRNA) comprising a sense strand and an antisense strand.

20. The composition of claim 19, wherein the sense strand is 12-30 nucleosides in length.

21. The composition of claim 19, wherein the antisense strand is 12-30 nucleosides in length.

22. A composition comprising an oligonucleotide that inhibits the expression of MTRES1, wherein the oligonucleotide comprises an siRNA comprising a sense strand and an antisense strand, each strand is independently about 12-30 nucleosides in length, and at least one of the sense strand and the antisense strand comprises a nucleoside sequence comprising about 12-30 contiguous nucleosides of SEQ ID NOS: 2675, 2677-2686, 2689, 2720, 2729, 2739, 2745, 2748, 2749, 2754, 2758-2762, 2766, 2767, 2769, 2770, 2786, 2787-2812, 2814-2816, 2819-2822, 2824, 2828-2833, 2836, 2838, 2839, 2857, 2859-2868, 2871, 2873, 2874, 2877-2879, 2940-2944, 2948-2952, 2968-2994, 2996-2998, 3001-3004, 3006, 3010, 3011, 3013-3015, 3018, or 3020.

23. The composition of claim 22, wherein any one of the following is true with regard to the sense strand:
all purines comprise 2′-fluoro modified purines, and all pyrimidines comprise a mixture of 2′-fluoro and 2′-methyl modified pyrimidines;
all purines comprise 2′-methyl modified purines, and all pyrimidines comprise a mixture of 2′-fluoro and 2′-methyl modified pyrimidines;
all purines comprise 2′-fluoro modified purines, and all pyrimidines comprise 2′-methyl modified pyrimidines;
all pyrimidines comprise 2′-fluoro modified pyrimidines, and all purines comprise a mixture of 2′-fluoro and 2′-methyl modified purines;
all pyrimidines comprise 2′-methyl modified pyrimidines, and all purines comprise a mixture of 2′-fluoro and 2′-methyl modified purines; or
all pyrimidines comprise 2′-fluoro modified pyrimidines, and all purines comprise 2′-methyl modified purines.

24. The composition of claim 22, wherein any one of the following is true with regard to the sense strand:
(a) all purines comprise 2′-fluoro modified purines and all pyrimidines comprise (i) a mixture of 2′-O-methyl and 2′-O-methoxyethyl modified pyrimidines; or (ii) a mixture of 2′-fluoro, 2′-O-methyl, and 2′-O-methoxyethyl modified pyrimidines;
(b) all purines comprise 2′-O-methyl modified purines and all pyrimidines comprise (i) a mixture of 2′-fluoro and 2′-O-methoxyethyl modified pyrimidines; or (ii) a mixture of 2′-fluoro, 2′-O-methyl, and 2′-O-methoxyethyl modified pyrimidines;
(c) all purines comprise 2′-O-methoxyethyl modified purines and all pyrimidines comprise (i) a mixture of 2′-fluoro and 2′-O-methyl modified pyrimidines; or (ii) a mixture of 2′-fluoro, 2′-O-methyl, and 2′-O-methoxyethyl modified pyrimidines;
(d) all purines comprise a mixture of 2′-fluoro and 2′-O-methyl modified purines and all pyrimidines comprise (i) 2′-O-methoxyethyl modified pyrimidines; (ii) a mixture of 2′-O-methyl and 2′-O-methoxyethyl modified pyrimidines; (iii) a mixture of 2′-fluoro and 2′-O-methoxyethyl modified pyrimidines; or (iv) a mixture of 2′-fluoro, 2′-O-methyl, and 2′-O-methoxyethyl modified pyrimidines;
(e) all purines comprise a mixture of 2′-fluoro and 2′-O-methoxyethyl modified purines and all pyrimidines comprise (i) 2′-O-methyl modified pyrimidines; (ii) a mixture of 2′-fluoro and 2′-O-methyl modified pyrimidines; (iii) a mixture of 2′-O-methyl and 2′-O-methoxyethyl modified pyrimidines; or (iv) a mixture of 2′-fluoro, 2′-O-methyl, and 2′-O-methoxyethyl modified pyrimidines;
(f) all purines comprise a mixture of 2′-O-methyl and 2′-O-methoxyethyl modified purines and all pyrimidines comprise (i) 2′-fluoro modified pyrimidines; (ii) a mixture of 2′-fluoro and 2′-O-methyl modified pyrimidines; (iii) a mixture of 2′-fluoro and 2′-O-methoxyethyl modified pyrimidines; or (iv) a mixture of 2′-fluoro, 2′-O-methyl, and 2′-O-methoxyethyl modified pyrimidines; or
(g) all purines comprise a mixture of 2′-fluoro, 2′-O-methyl, and 2′-O-methoxyethyl modified purines and all pyrimidines comprise (i) 2′-fluoro modified pyrimidines; (ii) 2′-O-methyl modified pyrimidines; (iii) 2′-O-methoxyethyl modified pyrimidines; (iv) a mixture of 2′-fluoro and 2′-O-methyl modified pyrimidines; (v) a mixture of 2′-O-methyl and 2′-O-methoxyethyl modified pyrimidines; (vi) a mixture of 2′-fluoro and 2′-O-methoxyethyl modified pyrimidines; or (vii) a mixture of 2′-fluoro, 2′-O-methyl, and 2′-O-methoxyethyl modified pyrimidines; and
with the proviso that in any of the foregoing, the sense strand may include a 2′-deoxy nucleoside.

25. The composition of claim 22, wherein any one of the following is true with regard to the antisense strand:
all purines comprise 2′-fluoro modified purines, and all pyrimidines comprise a mixture of 2′-fluoro and 2′-methyl modified pyrimidines;
all purines comprise 2′-methyl modified purines, and all pyrimidines comprise a mixture of 2′-fluoro and 2′-methyl modified pyrimidines;
all purines comprise 2′-methyl modified purines, and all pyrimidines comprise 2′-fluoro modified pyrimidines;
all pyrimidines comprise 2′-fluoro modified pyrimidines, and all purines comprise a mixture of 2′-fluoro and 2′-methyl modified purines;
all pyrimidines comprise 2′-methyl modified pyrimidines, and all purines comprise a mixture of 2′-fluoro and 2′-methyl modified purines; or
all pyrimidines comprise 2′-methyl modified pyrimidines, and all purines comprise 2′-fluoro modified purines.

26. The composition of claim 22, wherein the oligonucleotide comprises a phosphate at the 5′ end of the antisense strand.

27. The composition of claim 22, wherein the oligonucleotide comprises a phosphate mimic at the 5′ end of the antisense strand.

28. The composition of claim 22, wherein the phosphate mimic comprises a 5′-vinyl phosphonate (VP).

29. The composition of any one of the preceding claims, wherein the oligonucleotide comprises an antisense oligonucleotide (ASO).

30. The composition of claim 29, wherein the ASO is 12-30 nucleosides in length.

31. A composition comprising:
a small interfering RNA (siRNA) comprising a sense strand, an antisense strand complementary to a section of an MTRES1 mRNA, and a lipid moiety connected to an end of the sense or antisense strand;
wherein the lipid moiety comprises (a) a phenyl or cyclohexanyl linker, and (b) a lipid, wherein the linker is connected to the lipid and to the end of the sense or antisense strand.

32. The composition of claim 31, wherein the lipid and the end of the sense or antisense strand are connected to the phenyl or cyclohexanyl linker in the 1,4; 1,3; or 1,2 substitution pattern.

33. The composition of claim 31 or 32, wherein the lipid and the end of the sense or antisense strand are connected to the phenyl or cyclohexanyl linker in the 1,4-substitution pattern.

34. The composition of any one of claims 31-33, wherein the lipid moiety comprises the following structure: [chemical structure]
wherein the dotted line indicates a covalent connection to the end of the sense or antisense strand, with the proviso that R is not an octane.

35. The composition of any one of claims 31-33, wherein the lipid moiety comprises the following structure: [chemical structure]
wherein the dotted line indicates a covalent connection to the end of the sense or antisense strand, n is 1-3, and R is an alkyl group containing 4-18 carbons.

36. The composition of any one of claims 31-33, wherein the lipid moiety comprises the following structure: [chemical structure]
wherein the dotted line indicates a covalent connection to the end of the sense or antisense strand, n is 0-3, and R is an alkyl group containing 4-18 carbons.

37. The composition of any one of claims 31-33, wherein the lipid moiety comprises the following structure: [chemical structure]
wherein the dotted line indicates a covalent connection to the end of the sense or antisense strand.

38. The composition of claim 31, wherein the lipid moiety comprises a lipid moiety depicted in Table 1.

39. A composition comprising an siRNA that targets MTRES1 and when administered to a cell modulates the expression of MTRES1, wherein the siRNA comprises a sense strand and an antisense strand; and
wherein the sense strand or the antisense strand comprises any of modification patterns 33S to 65S or 11AS to 40AS.

40. The method of claim 39, wherein the oligonucleotide comprises any one of SEQ ID NOS: 1-2280, 2550-3037, 3263-3266,3281-3295, or 3338.

41. The method of claim 40, wherein the oligonucleotide comprises any one of SEQ ID NOS: 2675, 2677-2686, 2689, 2720, 2729, 2739, 2745, 2748, 2749, 2754, 2758-2762, 2766, 2767, 2769, 2770, 2786, 2787-2812, 2814-2816, 2819-2822, 2824, 2828-2833, 2836, 2838, 2839, 2857, 2859-2868, 2871, 2873, 2874, 2877-2879, 2940-2944, 2948-2952, 2968-2994, 2996-2998, 3001-3004, 3006, 3010, 3011, 3013-3015, 3018, or 3020.

42. A composition comprising an siRNA that targets MTRES1 and when administered to a cell modulates the expression of MTRES1, wherein the siRNA comprises a sense strand and an antisense strand; and wherein the sense strand comprises any one of SEQ ID NOs: 3038-3124, 3239, 3241-3242, 3259-3260, 3267-3273, 3296-3299, or 3305-3318 or the antisense strand comprises any one of SEQ ID NOs: 3125-3212, 3243-3250, 3261-3262, 3274-3280, 3300-3304, or 3319-3337.

43. The composition of any one of the preceding claims, further comprising a pharmaceutically acceptable carrier.

44. The composition of claim 43, wherein the composition is formulated for administration to a central nervous system.

45. The composition of claim 43 or 44, wherein the composition is formulated for delivery to a neural cell.

46. A method of treating a subject having a neurological disorder, the method comprising administering an effective amount of the composition of any one of claims 1-45 to the subject.

47. The method of claim 46, wherein the composition is administered intrathecally.

48. A method of treating a subject having a neurological disorder or who is at risk for developing the neurological disorder, the method comprising evaluating a subject's risk for developing a neurological disorder and administering an effective amount of the composition of any one of claims 1-45 to the subject.

49. The method of any one of claims 46-48, wherein the subject has a genotype at risk for developing Alzheimer's disease or dementia.

50. The method of claim 49, wherein the subject is a heterozygous or homozygous carrier of APOE4.

51. The method of claim 49, wherein the subject is a heterozygous or homozygous carrier of MTRES1 rs117058816-G (c.3+1G).

52. The method of any one of claims 46-49, wherein evaluating a subject's risk for developing a neurological disorder comprises calculating a polygenic risk score for developing Alzheimer's disease or dementia.

53. The method of claim 52, wherein the subject has a polygenic risk score in the 40^{th} percentile or higher, which is indicative of a high risk for developing Alzheimer's disease or dementia.

54. The method of claim 52, wherein the subject has a polygenic risk score in the 20^{th} percentile or higher, which is indicative of a high risk for developing Alzheimer's disease or dementia.

55. The method of claim 52, wherein calculating a polygenic risk score comprises providing genomic data comprising one or more genotypes of the subject, wherein the one or more genotypes is associated with a high risk for developing Alzheimer's disease or dementia.

The application's sequence listing, which the Patent Office published only in electronic form, follows.

SEQUENCE LISTING (3340 sequences)

SEQ ID NO: 1 - RNA, 19 nt, synthetic construct
  source 1..19: mol_type = other RNA
gcgcagataggggtagcct

SEQ ID NO: 2 - RNA, 19 nt, synthetic construct
  source 1..19: mol_type = other RNA
cgcagataggggtagcctg

SEQ ID NO: 3 - RNA, 19 nt, synthetic construct
  source 1..19: mol_type = other RNA
gcagataggggtagcctgg

SEQ ID NO: 4 - RNA, 19 nt, synthetic construct
  source 1..19: mol_type = other RNA
cagataggggtagcctgga

SEQ ID NO: 5 - RNA, 19 nt, synthetic construct
  source 1..19: mol_type = other RNA
agataggggtagcctggag

SEQ ID NO: 6 - RNA, 19 nt, synthetic construct
  source 1..19: mol_type = other RNA
gataggggtagcctggagg

SEQ ID NO: 7 - RNA, 19 nt, synthetic construct
  source 1..19: mol_type = other RNA
ataggggtagcctggaggc

SEQ ID NO: 8 - RNA, 19 nt, synthetic construct
  source 1..19: mol_type = other RNA
taggggtagcctggaggcc

SEQ ID NO: 9 - RNA, 19 nt, synthetic construct
  source 1..19: mol_type = other RNA
aggggtagcctggaggcct

SEQ ID NO: 10 - RNA, 19 nt, synthetic construct
  source 1..19: mol_type = other RNA
ggggtagcctggaggcctg

SEQ ID NO: 11 - RNA, 19 nt, synthetic construct
  source 1..19: mol_type = other RNA
gggtagcctggaggcctgc

SEQ ID NO: 12 - RNA, 19 nt, synthetic construct
  source 1..19: mol_type = other RNA
ggtagcctggaggcctgca

SEQ ID NO: 13 - RNA, 19 nt, synthetic construct
  source 1..19: mol_type = other RNA
gtagcctggaggcctgcag

SEQ ID NO: 14 - RNA, 19 nt, synthetic construct
  source 1..19: mol_type = other RNA
tagcctggaggcctgcagt

SEQ ID NO: 15 - RNA, 19 nt, synthetic construct
  source 1..19: mol_type = other RNA
agcctggaggcctgcagtc

SEQ ID NO: 16 - RNA, 19 nt, synthetic construct
  source 1..19: mol_type = other RNA
gcctggaggcctgcagtcc

SEQ ID NO: 17 - RNA, 19 nt, synthetic construct
  source 1..19: mol_type = other RNA
cctggaggcctgcagtccg

SEQ ID NO: 18 - RNA, 19 nt, synthetic construct
  source 1..19: mol_type = other RNA
ctggaggcctgcagtccgc

SEQ ID NO: 19 - RNA, 19 nt, synthetic construct
  source 1..19: mol_type = other RNA
tggaggcctgcagtccgcg

SEQ ID NO: 20 - RNA, 19 nt, synthetic construct
  source 1..19: mol_type = other RNA
ggaggcctgcagtccgcgc

SEQ ID NO: 21 - RNA, 19 nt, synthetic construct
  source 1..19: mol_type = other RNA
gaggcctgcagtccgcgcg

SEQ ID NO: 22 - RNA, 19 nt, synthetic construct
  source 1..19: mol_type = other RNA
aggcctgcagtccgcgcgg

SEQ ID NO: 23 - RNA, 19 nt, synthetic construct
  source 1..19: mol_type = other RNA
ggcctgcagtccgcgcggc

SEQ ID NO: 24 - RNA, 19 nt, synthetic construct
  source 1..19: mol_type = other RNA
gcctgcagtccgcgcggcc

SEQ ID NO: 25 - RNA, 19 nt, synthetic construct
  source 1..19: mol_type = other RNA
cctgcagtccgcgcggccg

SEQ ID NO: 26 - RNA, 19 nt, synthetic construct
  source 1..19: mol_type = other RNA
ctgcagtccgcgcggccgc

SEQ ID NO: 27 - RNA, 19 nt, synthetic construct
  source 1..19: mol_type = other RNA
tgcagtccgcgcggccgcg

SEQ ID NO: 28 - RNA, 19 nt, synthetic construct
  source 1..19: mol_type = other RNA
gcagtccgcgcggccgcgg

SEQ ID NO: 29 - RNA, 19 nt, synthetic construct
  source 1..19: mol_type = other RNA
cagtccgcgcggccgcggg

SEQ ID NO: 30 - RNA, 19 nt, synthetic construct
  source 1..19: mol_type = other RNA
agtccgcgcggccgcgggg

SEQ ID NO: 31 - RNA, 19 nt, synthetic construct
  source 1..19: mol_type = other RNA
gtccgcgcggccgcgggga

SEQ ID NO: 32 - RNA, 19 nt, synthetic construct
  source 1..19: mol_type = other RNA
tccgcgcggccgcggggag

SEQ ID NO: 33 - RNA, 19 nt, synthetic construct
  source 1..19: mol_type = other RNA
ccgcgcggccgcggggagg

SEQ ID NO: 34 - RNA, 19 nt, synthetic construct
  source 1..19: mol_type = other RNA
cgcgcggccgcggggaggg

SEQ ID NO: 35 - RNA, 19 nt, synthetic construct
  source 1..19: mol_type = other RNA
gcgcggccgcggggaggga

SEQ ID NO: 36 - RNA, 19 nt, synthetic construct
  source 1..19: mol_type = other RNA
cgcggccgcggggagggac

SEQ ID NO: 37 - RNA, 19 nt, synthetic construct
  source 1..19: mol_type = other RNA
gcggccgcggggagggacg

SEQ ID NO: 38 - RNA, 19 nt, synthetic construct
  source 1..19: mol_type = other RNA
cggccgcggggagggacga

SEQ ID NO: 39 - RNA, 19 nt, synthetic construct
  source 1..19: mol_type = other RNA
ggccgcggggagggacgag

SEQ ID NO: 40 - RNA, 19 nt, synthetic construct
  source 1..19: mol_type = other RNA
gccgcggggagggacgaga

SEQ ID NO: 41 - RNA, 19 nt, synthetic construct
  source 1..19: mol_type = other RNA
ccgcggggagggacgagag

SEQ ID NO: 42 - RNA, 19 nt, synthetic construct
  source 1..19: mol_type = other RNA
cgcggggagggacgagagg

SEQ ID NO: 43 - RNA, 19 nt, synthetic construct
  source 1..19: mol_type = other RNA
gcggggagggacgagaggg

SEQ ID NO: 44 - RNA, 19 nt, synthetic construct
  source 1..19: mol_type = other RNA
cggggagggacgagagggc

SEQ ID NO: 45 - RNA, 19 nt, synthetic construct
  source 1..19: mol_type = other RNA
ggggagggacgagagggcc

SEQ ID NO: 46 - RNA, 19 nt, synthetic construct
  source 1..19: mol_type = other RNA
gggagggacgagagggcct

SEQ ID NO: 47 - RNA, 19 nt, synthetic construct
  source 1..19: mol_type = other RNA
ggagggacgagagggcctg

SEQ ID NO: 48 - RNA, 19 nt, synthetic construct
  source 1..19: mol_type = other RNA
gagggacgagagggcctga

SEQ ID NO: 49 - RNA, 19 nt, synthetic construct
  source 1..19: mol_type = other RNA
agggacgagagggcctgac

SEQ ID NO: 50 - RNA, 19 nt, synthetic construct
  source 1..19: mol_type = other RNA
gggacgagagggcctgacg

SEQ ID NO: 51 - RNA, 19 nt, synthetic construct
  source 1..19: mol_type = other RNA
ggacgagagggcctgacgt

SEQ ID NO: 52 - RNA, 19 nt, synthetic construct
  source 1..19: mol_type = other RNA
gacgagagggcctgacgta

SEQ ID NO: 53 - RNA, 19 nt, synthetic construct
  source 1..19: mol_type = other RNA
acgagagggcctgacgtac

SEQ ID NO: 54 - RNA, 19 nt, synthetic construct
  source 1..19: mol_type = other RNA
cgagagggcctgacgtaca

SEQ ID NO: 55 - RNA, 19 nt, synthetic construct
  source 1..19: mol_type = other RNA
gagagggcctgacgtacag

SEQ ID NO: 56 - RNA, 19 nt, synthetic construct
  source 1..19: mol_type = other RNA
agagggcctgacgtacaga

SEQ ID NO: 57 - RNA, 19 nt, synthetic construct
  source 1..19: mol_type = other RNA
gagggcctgacgtacagat

SEQ ID NO: 58 - RNA, 19 nt, synthetic construct
  source 1..19: mol_type = other RNA
agggcctgacgtacagatt

SEQ ID NO: 59 - RNA, 19 nt, synthetic construct
  source 1..19: mol_type = other RNA
gggcctgacgtacagatta

SEQ ID NO: 60 - RNA, 19 nt, synthetic construct
  source 1..19: mol_type = other RNA
ggcctgacgtacagattat

SEQ ID NO: 61 - RNA, 19 nt, synthetic construct
  source 1..19: mol_type = other RNA
gcctgacgtacagattata

SEQ ID NO: 62 - RNA, 19 nt, synthetic construct
  source 1..19: mol_type = other RNA
cctgacgtacagattataa

SEQ ID NO: 63 - RNA, 19 nt, synthetic construct
  source 1..19: mol_type = other RNA
ctgacgtacagattataag

SEQ ID NO: 64 - RNA, 19 nt, synthetic construct
  source 1..19: mol_type = other RNA
tgacgtacagattataagc

SEQ ID NO: 65 - RNA, 19 nt, synthetic construct
  source 1..19: mol_type = other RNA
gacgtacagattataagcg

SEQ ID NO: 66 - RNA, 19 nt, synthetic construct
  source 1..19: mol_type = other RNA
acgtacagattataagcgc

SEQ ID NO: 67 - RNA, 19 nt, synthetic construct
  source 1..19: mol_type = other RNA
cgtacagattataagcgcc

SEQ ID NO: 68 - RNA, 19 nt, synthetic construct
  source 1..19: mol_type = other RNA
gtacagattataagcgcca

SEQ ID NO: 69 - RNA, 19 nt, synthetic construct
  source 1..19: mol_type = other RNA
tacagattataagcgccat

SEQ ID NO: 70 - RNA, 19 nt, synthetic construct
  source 1..19: mol_type = other RNA
acagattataagcgccatg

SEQ ID NO: 71 - RNA, 19 nt, synthetic construct
  source 1..19: mol_type = other RNA
cagattataagcgccatgg

SEQ ID NO: 72 - RNA, 19 nt, synthetic construct
  source 1..19: mol_type = other RNA
agattataagcgccatggc

SEQ ID NO: 73 - RNA, 19 nt, synthetic construct
  source 1..19: mol_type = other RNA
gattataagcgccatggct

SEQ ID NO: 74 - RNA, 19 nt, synthetic construct
  source 1..19: mol_type = other RNA
attataagcgccatggcta

SEQ ID NO: 75 - RNA, 19 nt, synthetic construct
  source 1..19: mol_type = other RNA
ttataagcgccatggctat

SEQ ID NO: 76 - RNA, 19 nt, synthetic construct
  source 1..19: mol_type = other RNA
tataagcgccatggctatg

SEQ ID NO: 77 - RNA, 19 nt, synthetic construct
  source 1..19: mol_type = other RNA
ataagcgccatggctatgg

SEQ ID NO: 78 - RNA, 19 nt, synthetic construct
  source 1..19: mol_type = other RNA
taagcgccatggctatggc

SEQ ID NO: 79 - RNA, 19 nt, synthetic construct
  source 1..19: mol_type = other RNA
aagcgccatggctatggct

SEQ ID NO: 80 - RNA, 19 nt, synthetic construct
  source 1..19: mol_type = other RNA
agcgccatggctatggcta

SEQ ID NO: 81 - RNA, 19 nt, synthetic construct
  source 1..19: mol_type = other RNA
gcgccatggctatggctag

SEQ ID NO: 82 - RNA, 19 nt, synthetic construct
  source 1..19: mol_type = other RNA
cgccatggctatggctagt

SEQ ID NO: 83 - RNA, 19 nt, synthetic construct
  source 1..19: mol_type = other RNA
gccatggctatggctagtg

SEQ ID NO: 84 - RNA, 19 nt, synthetic construct
  source 1..19: mol_type = other RNA
ccatggctatggctagtgt

SEQ ID NO: 85 - RNA, 19 nt, synthetic construct
  source 1..19: mol_type = other RNA
catggctatggctagtgtt

SEQ ID NO: 86 - RNA, 19 nt, synthetic construct
  source 1..19: mol_type = other RNA
atggctatggctagtgtta

SEQ ID NO: 87 - RNA, 19 nt, synthetic construct
  source 1..19: mol_type = other RNA
tggctatggctagtgttaa

SEQ ID NO: 88 - RNA, 19 nt, synthetic construct
  source 1..19: mol_type = other RNA
ggctatggctagtgttaaa

SEQ ID NO: 89 - RNA, 19 nt, synthetic construct
  source 1..19: mol_type = other RNA
gctatggctagtgttaaat

SEQ ID NO: 90 - RNA, 19 nt, synthetic construct
  source 1..19: mol_type = other RNA
ctatggctagtgttaaatt

SEQ ID NO: 91 - RNA, 19 nt, synthetic construct
  source 1..19: mol_type = other RNA
tatggctagtgttaaattg

SEQ ID NO: 92 - RNA, 19 nt, synthetic construct
  source 1..19: mol_type = other RNA
atggctagtgttaaattgc

SEQ ID NO: 93 - RNA, 19 nt, synthetic construct
  source 1..19: mol_type = other RNA
tggctagtgttaaattgct

SEQ ID NO: 94 - RNA, 19 nt, synthetic construct
  source 1..19: mol_type = other RNA
ggctagtgttaaattgctt

SEQ ID NO: 95 - RNA, 19 nt, synthetic construct
  source 1..19: mol_type = other RNA
gctagtgttaaattgcttg

SEQ ID NO: 96 - RNA, 19 nt, synthetic construct
  source 1..19: mol_type = other RNA
ctagtgttaaattgcttgc

SEQ ID NO: 97 - RNA, 19 nt, synthetic construct
  source 1..19: mol_type = other RNA
tagtgttaaattgcttgcc

SEQ ID NO: 98 - RNA, 19 nt, synthetic construct
  source 1..19: mol_type = other RNA
agtgttaaattgcttgccg

SEQ ID NO: 99 - RNA, 19 nt, synthetic construct
  source 1..19: mol_type = other RNA
gtgttaaattgcttgccgg

SEQ ID NO: 100 - RNA, 19 nt, synthetic construct
  source 1..19: mol_type = other RNA
tgttaaattgcttgccggt

SEQ ID NO: 101 - RNA, 19 nt, synthetic construct
  source 1..19: mol_type = other RNA
gttaaattgcttgccggtg

SEQ ID NO: 102 - RNA, 19 nt, synthetic construct
  source 1..19: mol_type = other RNA
ttaaattgcttgccggtgt

SEQ ID NO: 103 - RNA, 19 nt, synthetic construct
  source 1..19: mol_type = other RNA
taaattgcttgccggtgtt

SEQ ID NO: 104 - RNA, 19 nt, synthetic construct
  source 1..19: mol_type = other RNA
aaattgcttgccggtgttt

SEQ ID NO: 105 - RNA, 19 nt, synthetic construct
  source 1..19: mol_type = other RNA
aattgcttgccggtgtttt

SEQ ID NO: 106 - RNA, 19 nt, synthetic construct
  source 1..19: mol_type = other RNA
attgcttgccggtgtttta

SEQ ID NO: 107 - RNA, 19 nt, synthetic construct
  source 1..19: mol_type = other RNA
ttgcttgccggtgttttaa

SEQ ID NO: 108 - RNA, 19 nt, synthetic construct
  source 1..19: mol_type = other RNA
tgcttgccggtgttttaag

SEQ ID NO: 109 - RNA, 19 nt, synthetic construct
  source 1..19: mol_type = other RNA
gcttgccggtgttttaaga

SEQ ID NO: 110 - RNA, 19 nt, synthetic construct
  source 1..19: mol_type = other RNA
cttgccggtgttttaagaa

SEQ ID NO: 111 - RNA, 19 nt, synthetic construct
  source 1..19: mol_type = other RNA
ttgccggtgttttaagaaa

SEQ ID NO: 112 - RNA, 19 nt, synthetic construct
  source 1..19: mol_type = other RNA
tgccggtgttttaagaaag

SEQ ID NO: 113 - RNA, 19 nt, synthetic construct
  source 1..19: mol_type = other RNA
gccggtgttttaagaaagc

SEQ ID NO: 114 - RNA, 19 nt, synthetic construct
  source 1..19: mol_type = other RNA
ccggtgttttaagaaagcc

SEQ ID NO: 115 - RNA, 19 nt, synthetic construct
  source 1..19: mol_type = other RNA
cggtgttttaagaaagcca

SEQ ID NO: 116 - RNA, 19 nt, synthetic construct
  source 1..19: mol_type = other RNA
ggtgttttaagaaagccag

SEQ ID NO: 117 - RNA, 19 nt, synthetic construct
  source 1..19: mol_type = other RNA
gtgttttaagaaagccaga

SEQ ID NO: 118 - RNA, 19 nt, synthetic construct
  source 1..19: mol_type = other RNA
tgttttaagaaagccagat

SEQ ID NO: 119 - RNA, 19 nt, synthetic construct
  source 1..19: mol_type = other RNA
gttttaagaaagccagatg

SEQ ID NO: 120 - RNA, 19 nt, synthetic construct
  source 1..19: mol_type = other RNA
ttttaagaaagccagatgc

SEQ ID NO: 121 - RNA, 19 nt, synthetic construct
  source 1..19: mol_type = other RNA
tttaagaaagccagatgcc

SEQ ID NO: 122 - RNA, 19 nt, synthetic construct
  source 1..19: mol_type = other RNA
ttaagaaagccagatgcct

SEQ ID NO: 123 - RNA, 19 nt, synthetic construct
  source 1..19: mol_type = other RNA
taagaaagccagatgcctg

SEQ ID NO: 124 - RNA, 19 nt, synthetic construct
  source 1..19: mol_type = other RNA
aagaaagccagatgcctgg

SEQ ID NO: 125 - RNA, 19 nt, synthetic construct
  source 1..19: mol_type = other RNA
agaaagccagatgcctgga

SEQ ID NO: 126 - RNA, 19 nt, synthetic construct
  source 1..19: mol_type = other RNA
gaaagccagatgcctggat

SEQ ID NO: 127 - RNA, 19 nt, synthetic construct
  source 1..19: mol_type = other RNA
aaagccagatgcctggatt

SEQ ID NO: 128 - RNA, 19 nt, synthetic construct
  source 1..19: mol_type = other RNA
aagccagatgcctggattg

SEQ ID NO: 129 - RNA, 19 nt, synthetic construct
  source 1..19: mol_type = other RNA
agccagatgcctggattgg

SEQ ID NO: 130 - RNA, 19 nt, synthetic construct
  source 1..19: mol_type = other RNA
gccagatgcctggattgga

SEQ ID NO: 131 - RNA, 19 nt, synthetic construct
  source 1..19: mol_type = other RNA
ccagatgcctggattggac

SEQ ID NO: 132 - RNA, 19 nt, synthetic construct
  source 1..19: mol_type = other RNA
cagatgcctggattggact

SEQ ID NO: 133 - RNA, 19 nt, synthetic construct
  source 1..19: mol_type = other RNA
agatgcctggattggactc

SEQ ID NO: 134 - RNA, 19 nt, synthetic construct
  source 1..19: mol_type = other RNA
gatgcctggattggactct

SEQ ID NO: 135 - RNA, 19 nt, synthetic construct
  source 1..19: mol_type = other RNA
atgcctggattggactctg

SEQ ID NO: 136 - RNA, 19 nt, synthetic construct
  source 1..19: mol_type = other RNA
tgcctggattggactctgg

SEQ ID NO: 137 - RNA, 19 nt, synthetic construct
  source 1..19: mol_type = other RNA
gcctggattggactctggg

SEQ ID NO: 138 - RNA, 19 nt, synthetic construct
  source 1..19: mol_type = other RNA
cctggattggactctgggg

SEQ ID NO: 139 - RNA, 19 nt, synthetic construct
  source 1..19: mol_type = other RNA
ctggattggactctggggt

SEQ ID NO: 140 - RNA, 19 nt, synthetic construct
  source 1..19: mol_type = other RNA
tggattggactctggggtg

SEQ ID NO: 141 - RNA, 19 nt, synthetic construct
  source 1..19: mol_type = other RNA
ggattggactctggggtgt

SEQ ID NO: 142 - RNA, 19 nt, synthetic construct
  source 1..19: mol_type = other RNA
gattggactctggggtgtt

SEQ ID NO: 143 - RNA, 19 nt, synthetic construct
  source 1..19: mol_type = other RNA
attggactctggggtgttc

SEQ ID NO: 144 - RNA, 19 nt, synthetic construct
  source 1..19: mol_type = other RNA
ttggactctggggtgttct

SEQ ID NO: 145 - RNA, 19 nt, synthetic construct
  source 1..19: mol_type = other RNA
tggactctggggtgttctc

SEQ ID NO: 146 - RNA, 19 nt, synthetic construct
  source 1..19: mol_type = other RNA
ggactctggggtgttctcc

SEQ ID NO: 147 - RNA, 19 nt, synthetic construct
  source 1..19: mol_type = other RNA
gactctggggtgttctccg

SEQ ID NO: 148 - RNA, 19 nt, synthetic construct
  source 1..19: mol_type = other RNA
actctggggtgttctccga

SEQ ID NO: 149 - RNA, 19 nt, synthetic construct
  source 1..19: mol_type = other RNA
ctctggggtgttctccgag

SEQ ID NO: 150 - RNA, 19 nt, synthetic construct
  source 1..19: mol_type = other RNA
tctggggtgttctccgagg

SEQ ID NO: 151 - RNA, 19 nt, synthetic construct
  source 1..19: mol_type = other RNA
ctggggtgttctccgaggg

SEQ ID NO: 152 - RNA, 19 nt, synthetic construct
  source 1..19: mol_type = other RNA
tggggtgttctccgaggga

SEQ ID NO: 153 - RNA, 19 nt, synthetic construct
  source 1..19: mol_type = other RNA
ggggtgttctccgagggac

SEQ ID NO: 154 - RNA, 19 nt, synthetic construct
  source 1..19: mol_type = other RNA
gggtgttctccgagggaca

SEQ ID NO: 155 - RNA, 19 nt, synthetic construct
  source 1..19: mol_type = other RNA
ggtgttctccgagggacac

SEQ ID NO: 156 - RNA, 19 nt, synthetic construct
  source 1..19: mol_type = other RNA
gtgttctccgagggacacc

SEQ ID NO: 157 - RNA, 19 nt, synthetic construct
  source 1..19: mol_type = other RNA
tgttctccgagggacacct

SEQ ID NO: 158 - RNA, 19 nt, synthetic construct
  source 1..19: mol_type = other RNA
gttctccgagggacacctt

SEQ ID NO: 159 - RNA, 19 nt, synthetic construct
  source 1..19: mol_type = other RNA
ttctccgagggacaccttc

SEQ ID NO: 160 - RNA, 19 nt, synthetic construct
  source 1..19: mol_type = other RNA
tctccgagggacaccttca

SEQ ID NO: 161 - RNA, 19 nt, synthetic construct
  source 1..19: mol_type = other RNA
ctccgagggacaccttcat

SEQ ID NO: 162 - RNA, 19 nt, synthetic construct
  source 1..19: mol_type = other RNA
tccgagggacaccttcatc

SEQ ID NO: 163 - RNA, 19 nt, synthetic construct
  source 1..19: mol_type = other RNA
ccgagggacaccttcatca

SEQ ID NO: 164 - RNA, 19 nt, synthetic construct
  source 1..19: mol_type = other RNA
cgagggacaccttcatcat

SEQ ID NO: 165 - RNA, 19 nt, synthetic construct
  source 1..19: mol_type = other RNA
gagggacaccttcatcata

SEQ ID NO: 166 - RNA, 19 nt, synthetic construct
  source 1..19: mol_type = other RNA
agggacaccttcatcatac

SEQ ID NO: 167 - RNA, 19 nt, synthetic construct
  source 1..19: mol_type = other RNA
gggacaccttcatcataca

SEQ ID NO: 168 - RNA, 19 nt, synthetic construct
  source 1..19: mol_type = other RNA
ggacaccttcatcatacaa

SEQ ID NO: 169 - RNA, 19 nt, synthetic construct
  source 1..19: mol_type = other RNA
gacaccttcatcatacaaa

SEQ ID NO: 170 - RNA, 19 nt, synthetic construct
  source 1..19: mol_type = other RNA
acaccttcatcatacaaac

SEQ ID NO: 171 - RNA, 19 nt, synthetic construct
  source 1..19: mol_type = other RNA
caccttcatcatacaaact

SEQ ID NO: 172 - RNA, 19 nt, synthetic construct
  source 1..19: mol_type = other RNA
accttcatcatacaaactc

SEQ ID NO: 173 - RNA, 19 nt, synthetic construct
  source 1..19: mol_type = other RNA
ccttcatcatacaaactct

SEQ ID NO: 174 - RNA, 19 nt, synthetic construct
  source 1..19: mol_type = other RNA
cttcatcatacaaactctg

SEQ ID NO: 175 - RNA, 19 nt, synthetic construct
  source 1..19: mol_type = other RNA
ttcatcatacaaactctgt

SEQ ID NO: 176 - RNA, 19 nt, synthetic construct
  source 1..19: mol_type = other RNA
tcatcatacaaactctgta

SEQ ID NO: 177 - RNA, 19 nt, synthetic construct
  source 1..19: mol_type = other RNA
catcatacaaactctgtac

SEQ ID NO: 178 - RNA, 19 nt, synthetic construct
  source 1..19: mol_type = other RNA
atcatacaaactctgtact

SEQ ID NO: 179 - RNA, 19 nt, synthetic construct
  source 1..19: mol_type = other RNA
tcatacaaactctgtactt

SEQ ID NO: 180 - RNA, 19 nt, synthetic construct
  source 1..19: mol_type = other RNA
catacaaactctgtacttc

SEQ ID NO: 181 - RNA, 19 nt, synthetic construct
  source 1..19: mol_type = other RNA
atacaaactctgtacttcc

SEQ ID NO: 182 - RNA, 19 nt, synthetic construct
  source 1..19: mol_type = other RNA
tacaaactctgtacttcct

SEQ ID NO: 183 - RNA, 19 nt, synthetic construct
  source 1..19: mol_type = other RNA
acaaactctgtacttcctg

SEQ ID NO: 184 - RNA, 19 nt, synthetic construct
  source 1..19: mol_type = other RNA
caaactctgtacttcctgg

SEQ ID NO: 185 - RNA, 19 nt, synthetic construct
  source 1..19: mol_type = other RNA
aaactctgtacttcctgga

SEQ ID NO: 186 - RNA, 19 nt, synthetic construct
  source 1..19: mol_type = other RNA
aactctgtacttcctggaa

SEQ ID NO: 187 - RNA, 19 nt, synthetic construct
  source 1..19: mol_type = other RNA
actctgtacttcctggaat

SEQ ID NO: 188 - RNA, 19 nt, synthetic construct
  source 1..19: mol_type = other RNA
ctctgtacttcctggaatc

SEQ ID NO: 189 - RNA, 19 nt, synthetic construct
  source 1..19: mol_type = other RNA
tctgtacttcctggaatcg

SEQ ID NO: 190 - RNA, 19 nt, synthetic construct
  source 1..19: mol_type = other RNA
ctgtacttcctggaatcga

SEQ ID NO: 191 - RNA, 19 nt, synthetic construct
  source 1..19: mol_type = other RNA
tgtacttcctggaatcgat

SEQ ID NO: 192 - RNA, 19 nt, synthetic construct
  source 1..19: mol_type = other RNA
gtacttcctggaatcgata

SEQ ID NO: 193 - RNA, 19 nt, synthetic construct
  source 1..19: mol_type = other RNA
tacttcctggaatcgatac

SEQ ID NO: 194 - RNA, 19 nt, synthetic construct
  source 1..19: mol_type = other RNA
acttcctggaatcgatact

SEQ ID NO: 195 - RNA, 19 nt, synthetic construct
  source 1..19: mol_type = other RNA
cttcctggaatcgatactt

SEQ ID NO: 196 - RNA, 19 nt, synthetic construct
  source 1..19: mol_type = other RNA
ttcctggaatcgatacttg

SEQ ID NO: 197 - RNA, 19 nt, synthetic construct
  source 1..19: mol_type = other RNA
tcctggaatcgatacttgt

SEQ ID NO: 198 - RNA, 19 nt, synthetic construct
  source 1..19: mol_type = other RNA
cctggaatcgatacttgta

SEQ ID NO: 199 - RNA, 19 nt, synthetic construct
  source 1..19: mol_type = other RNA
ctggaatcgatacttgtat

SEQ ID NO: 200 - RNA, 19 nt, synthetic construct
  source 1..19: mol_type = other RNA
tggaatcgatacttgtatt

SEQ ID NO: 201 - RNA, 19 nt, synthetic construct
  source 1..19: mol_type = other RNA
ggaatcgatacttgtattt

SEQ ID NO: 202 - RNA, 19 nt, synthetic construct
  source 1..19: mol_type = other RNA
gaatcgatacttgtatttt

SEQ ID NO: 203 - RNA, 19 nt, synthetic construct
  source 1..19: mol_type = other RNA
aatcgatacttgtattttt

SEQ ID NO: 204 - RNA, 19 nt, synthetic construct
  source 1..19: mol_type = other RNA
atcgatacttgtatttttc

SEQ ID NO: 205 - RNA, 19 nt, synthetic construct
  source 1..19: mol_type = other RNA
tcgatacttgtatttttct

SEQ ID NO: 206 - RNA, 19 nt, synthetic construct
  source 1..19: mol_type = other RNA
cgatacttgtatttttcta

SEQ ID NO: 207 - RNA, 19 nt, synthetic construct
  source 1..19: mol_type = other RNA
gatacttgtatttttctag

SEQ ID NO: 208 - RNA, 19 nt, synthetic construct
  source 1..19: mol_type = other RNA
atacttgtatttttctagt

SEQ ID NO: 209 - RNA, 19 nt, synthetic construct
  source 1..19: mol_type = other RNA
tacttgtatttttctagta

SEQ ID NO: 210 - RNA, 19 nt, synthetic construct
  source 1..19: mol_type = other RNA
acttgtatttttctagtac

SEQ ID NO: 211 - RNA, 19 nt, synthetic construct
  source 1..19: mol_type = other RNA
cttgtatttttctagtacc

SEQ ID NO: 212 - RNA, 19 nt, synthetic construct
  source 1..19: mol_type = other RNA
ttgtatttttctagtacca

SEQ ID NO: 213 - RNA, 19 nt, synthetic construct
  source 1..19: mol_type = other RNA
tgtatttttctagtaccaa

SEQ ID NO: 214 - RNA, 19 nt, synthetic construct
  source 1..19: mol_type = other RNA
gtatttttctagtaccaag

SEQ ID NO: 215 - RNA, 19 nt, synthetic construct
  source 1..19: mol_type = other RNA
tatttttctagtaccaagt

SEQ ID NO: 216 - RNA, 19 nt, synthetic construct
  source 1..19: mol_type = other RNA
atttttctagtaccaagtt

SEQ ID NO: 217 - RNA, 19 nt, synthetic construct
  source 1..19: mol_type = other RNA
tttttctagtaccaagtta

SEQ ID NO: 218 - RNA, 19 nt, synthetic construct
  source 1..19: mol_type = other RNA
ttttctagtaccaagttac

SEQ ID NO: 219 - RNA, 19 nt, synthetic construct
  source 1..19: mol_type = other RNA
tttctagtaccaagttacg

SEQ ID NO: 220 - RNA, 19 nt, synthetic construct
  source 1..19: mol_type = other RNA
ttctagtaccaagttacgt

SEQ ID NO: 221 - RNA, 19 nt, synthetic construct
  source 1..19: mol_type = other RNA
tctagtaccaagttacgtg

SEQ ID NO: 222 - RNA, 19 nt, synthetic construct
  source 1..19: mol_type = other RNA
ctagtaccaagttacgtgc

SEQ ID NO: 223 - RNA, 19 nt, synthetic construct
  source 1..19: mol_type = other RNA
tagtaccaagttacgtgca

SEQ ID NO: 224 - RNA, 19 nt, synthetic construct
  source 1..19: mol_type = other RNA
agtaccaagttacgtgcac

SEQ ID NO: 225 - RNA, 19 nt, synthetic construct
  source 1..19: mol_type = other RNA
gtaccaagttacgtgcacc

SEQ ID NO: 226 - RNA, 19 nt, synthetic construct
  source 1..19: mol_type = other RNA
taccaagttacgtgcacca

SEQ ID NO: 227 - RNA, 19 nt, synthetic construct
  source 1..19: mol_type = other RNA
accaagttacgtgcaccaa

SEQ ID NO: 228 - RNA, 19 nt, synthetic construct
  source 1..19: mol_type = other RNA
ccaagttacgtgcaccaaa

SEQ ID NO: 229 - RNA, 19 nt, synthetic construct
  source 1..19: mol_type = other RNA
caagttacgtgcaccaaat

SEQ ID NO: 230 - RNA, 19 nt, synthetic construct
  source 1..19: mol_type = other RNA
aagttacgtgcaccaaatt

SEQ ID NO: 231 - RNA, 19 nt, synthetic construct
  source 1..19: mol_type = other RNA
agttacgtgcaccaaatta

SEQ ID NO: 232 - RNA, 19 nt, synthetic construct
  source 1..19: mol_type = other RNA
gttacgtgcaccaaattat

SEQ ID NO: 233 - RNA, 19 nt, synthetic construct
  source 1..19: mol_type = other RNA
ttacgtgcaccaaattata

SEQ ID NO: 234 - RNA, 19 nt, synthetic construct
  source 1..19: mol_type = other RNA
tacgtgcaccaaattataa

SEQ ID NO: 235 - RNA, 19 nt, synthetic construct
  source 1..19: mol_type = other RNA
acgtgcaccaaattataaa

SEQ ID NO: 236 - RNA, 19 nt, synthetic construct
  source 1..19: mol_type = other RNA
cgtgcaccaaattataaaa

SEQ ID NO: 237 - RNA, 19 nt, synthetic construct
  source 1..19: mol_type = other RNA
gtgcaccaaattataaaac

SEQ ID NO: 238 - RNA, 19 nt, synthetic construct
  source 1..19: mol_type = other RNA
tgcaccaaattataaaaca

SEQ ID NO: 239 - RNA, 19 nt, synthetic construct
  source 1..19: mol_type = other RNA
gcaccaaattataaaacac

SEQ ID NO: 240 - RNA, 19 nt, synthetic construct
  source 1..19: mol_type = other RNA
caccaaattataaaacact

SEQ ID NO: 241 - RNA, 19 nt, synthetic construct
  source 1..19: mol_type = other RNA
accaaattataaaacactt

SEQ ID NO: 242 - RNA, 19 nt, synthetic construct
  source 1..19: mol_type = other RNA
ccaaattataaaacacttt

SEQ ID NO: 243 - RNA, 19 nt, synthetic construct
  source 1..19: mol_type = other RNA
caaattataaaacactttt

SEQ ID NO: 244 - RNA, 19 nt, synthetic construct
  source 1..19: mol_type = other RNA
aaattataaaacacttttt

SEQ ID NO: 245 - RNA, 19 nt, synthetic construct
  source 1..19: mol_type = other RNA
aattataaaacactttttt

SEQ ID NO: 246 - RNA, 19 nt, synthetic construct
  source 1..19: mol_type = other RNA
attataaaacactttttta

SEQ ID NO: 247 - RNA, 19 nt, synthetic construct
  source 1..19: mol_type = other RNA
ttataaaacacttttttat

SEQ ID NO: 248 - RNA, 19 nt, synthetic construct
  source 1..19: mol_type = other RNA
tataaaacacttttttata

SEQ ID NO: 249 - RNA, 19 nt, synthetic construct
  source 1..19: mol_type = other RNA
ataaaacacttttttataa

SEQ ID NO: 250 - RNA, 19 nt, synthetic construct
  source 1..19: mol_type = other RNA
taaaacacttttttataat

SEQ ID NO: 251 - RNA, 19 nt, synthetic construct
  source 1..19: mol_type = other RNA
aaaacacttttttataata

SEQ ID NO: 252 - RNA, 19 nt, synthetic construct
  source 1..19: mol_type = other RNA
aaacacttttttataatat

SEQ ID NO: 253 - RNA, 19 nt, synthetic construct
  source 1..19: mol_type = other RNA
aacacttttttataatatt

SEQ ID NO: 254 - RNA, 19 nt, synthetic construct
  source 1..19: mol_type = other RNA
acacttttttataatattt

SEQ ID NO: 255 - RNA, 19 nt, synthetic construct
  source 1..19: mol_type = other RNA
cacttttttataatatttt

SEQ ID NO: 256 - RNA, 19 nt, synthetic construct
  source 1..19: mol_type = other RNA
acttttttataatattttc

SEQ ID NO: 257 - RNA, 19 nt, synthetic construct
  source 1..19: mol_type = other RNA
cttttttataatattttct

SEQ ID NO: 258 - RNA, 19 nt, synthetic construct
  source 1..19: mol_type = other RNA
ttttttataatattttctc

SEQ ID NO: 259 - RNA, 19 nt, synthetic construct
  source 1..19: mol_type = other RNA
tttttataatattttctca

SEQ ID NO: 260 - RNA, 19 nt, synthetic construct
  source 1..19: mol_type = other RNA
ttttataatattttctcac

SEQ ID NO: 261 - RNA, 19 nt, synthetic construct
  source 1..19: mol_type = other RNA
tttataatattttctcact

SEQ ID NO: 262 - RNA, 19 nt, synthetic construct
  source 1..19: mol_type = other RNA
ttataatattttctcactg

SEQ ID NO: 263 - RNA, 19 nt, synthetic construct
  source 1..19: mol_type = other RNA
tataatattttctcactga

SEQ ID NO: 264 - RNA, 19 nt, synthetic construct
  source 1..19: mol_type = other RNA
ataatattttctcactgag

SEQ ID NO: 265 - RNA, 19 nt, synthetic construct
  source 1..19: mol_type = other RNA
taatattttctcactgaga

SEQ ID NO: 266 - RNA, 19 nt, synthetic construct
  source 1..19: mol_type = other RNA
aatattttctcactgagac

SEQ ID NO: 267 - RNA, 19 nt, synthetic construct
  source 1..19: mol_type = other RNA
atattttctcactgagact

SEQ ID NO: 268 - RNA, 19 nt, synthetic construct
  source 1..19: mol_type = other RNA
tattttctcactgagactc

SEQ ID NO: 269 - RNA, 19 nt, synthetic construct
  source 1..19: mol_type = other RNA
attttctcactgagactcc

SEQ ID NO: 270 - RNA, 19 nt, synthetic construct
  source 1..19: mol_type = other RNA
ttttctcactgagactccc

SEQ ID NO: 271 - RNA, 19 nt, synthetic construct
  source 1..19: mol_type = other RNA
tttctcactgagactccca

SEQ ID NO: 272 - RNA, 19 nt, synthetic construct
  source 1..19: mol_type = other RNA
ttctcactgagactcccag

SEQ ID NO: 273 - RNA, 19 nt, synthetic construct
  source 1..19: mol_type = other RNA
tctcactgagactcccagg

SEQ ID NO: 274 - RNA, 19 nt, synthetic construct
  source 1..19: mol_type = other RNA
ctcactgagactcccaggg

SEQ ID NO: 275 - RNA, 19 nt, synthetic construct
  source 1..19: mol_type = other RNA
tcactgagactcccagggc

SEQ ID NO: 276 - RNA, 19 nt, synthetic construct
  source 1..19: mol_type = other RNA
cactgagactcccagggct

SEQ ID NO: 277 - RNA, 19 nt, synthetic construct
  source 1..19: mol_type = other RNA
actgagactcccagggctt

SEQ ID NO: 278 - RNA, 19 nt, synthetic construct
  source 1..19: mol_type = other RNA
ctgagactcccagggcttt

SEQ ID NO: 279 - RNA, 19 nt, synthetic construct
  source 1..19: mol_type = other RNA
tgagactcccagggctttt

SEQ ID NO: 280 - RNA, 19 nt, synthetic construct
  source 1..19: mol_type = other RNA
gagactcccagggctttta

SEQ ID NO: 281 - RNA, 19 nt, synthetic construct
  source 1..19: mol_type = other RNA
agactcccagggcttttac

SEQ ID NO: 282 - RNA, 19 nt, synthetic construct
  source 1..19: mol_type = other RNA
gactcccagggcttttact

SEQ ID NO: 283 - RNA, 19 nt, synthetic construct
  source 1..19: mol_type = other RNA
actcccagggcttttacta

SEQ ID NO: 284 - RNA, 19 nt, synthetic construct
  source 1..19: mol_type = other RNA
ctcccagggcttttactat

SEQ ID NO: 285 - RNA, 19 nt, synthetic construct
  source 1..19: mol_type = other RNA
tcccagggcttttactatc

SEQ ID NO: 286 - RNA, 19 nt, synthetic construct
  source 1..19: mol_type = other RNA
cccagggcttttactatct

SEQ ID NO: 287 - RNA, 19 nt, synthetic construct
  source 1..19: mol_type = other RNA
ccagggcttttactatctc

SEQ ID NO: 288 - RNA, 19 nt, synthetic construct
  source 1..19: mol_type = other RNA
cagggcttttactatctcc

SEQ ID NO: 289 - RNA, 19 nt, synthetic construct
  source 1..19: mol_type = other RNA
agggcttttactatctcca

SEQ ID NO: 290 - RNA, 19 nt, synthetic construct
  source 1..19: mol_type = other RNA
gggcttttactatctccag

SEQ ID NO: 291 - RNA, 19 nt, synthetic construct
  source 1..19: mol_type = other RNA
ggcttttactatctccaga

SEQ ID NO: 292 - RNA, 19 nt, synthetic construct
  source 1..19: mol_type = other RNA
gcttttactatctccagaa

SEQ ID NO: 293 - RNA, 19 nt, synthetic construct
  source 1..19: mol_type = other RNA
cttttactatctccagaat

SEQ ID NO: 294 - RNA, 19 nt, synthetic construct
  source 1..19: mol_type = other RNA
ttttactatctccagaatg

SEQ ID NO: 295 - RNA, 19 nt, synthetic construct
  source 1..19: mol_type = other RNA
tttactatctccagaatgt

SEQ ID NO: 296 - RNA, 19 nt, synthetic construct
  source 1..19: mol_type = other RNA
ttactatctccagaatgta

SEQ ID NO: 297 - RNA, 19 nt, synthetic construct
  source 1..19: mol_type = other RNA
tactatctccagaatgtat

SEQ ID NO: 298 - RNA, 19 nt, synthetic construct
  source 1..19: mol_type = other RNA
actatctccagaatgtatt

SEQ ID NO: 299 - RNA, 19 nt, synthetic construct
  source 1..19: mol_type = other RNA
ctatctccagaatgtattt

SEQ ID NO: 300 - RNA, 19 nt, synthetic construct
  source 1..19: mol_type = other RNA
tatctccagaatgtatttt

SEQ ID NO: 301 - RNA, 19 nt, synthetic construct
  source 1..19: mol_type = other RNA
atctccagaatgtattttt

SEQ ID NO: 302 - RNA, 19 nt, synthetic construct
  source 1..19: mol_type = other RNA
tctccagaatgtatttttc

SEQ ID NO: 303 - RNA, 19 nt, synthetic construct
  source 1..19: mol_type = other RNA
ctccagaatgtatttttcc

SEQ ID NO: 304 - RNA, 19 nt, synthetic construct
  source 1..19: mol_type = other RNA
tccagaatgtatttttcct

SEQ ID NO: 305 - RNA, 19 nt, synthetic construct
  source 1..19: mol_type = other RNA
ccagaatgtatttttcctt

SEQ ID NO: 306 - RNA, 19 nt, synthetic construct
  source 1..19: mol_type = other RNA
cagaatgtatttttccttt

SEQ ID NO: 307 - RNA, 19 nt, synthetic construct
  source 1..19: mol_type = other RNA
agaatgtatttttcctttt

SEQ ID NO: 308 - RNA, 19 nt, synthetic construct
  source 1..19: mol_type = other RNA
gaatgtatttttccttttt

SEQ ID NO: 309 - RNA, 19 nt, synthetic construct
  source 1..19: mol_type = other RNA
aatgtatttttcctttttc

SEQ ID NO: 310 - RNA, 19 nt, synthetic construct
  source 1..19: mol_type = other RNA
atgtatttttcctttttcc

SEQ ID NO: 311 - RNA, 19 nt, synthetic construct
  source 1..19: mol_type = other RNA
tgtatttttcctttttccg

SEQ ID NO: 312 - RNA, 19 nt, synthetic construct
  source 1..19: mol_type = other RNA
gtatttttcctttttccgt

SEQ ID NO: 313 - RNA, 19 nt, synthetic construct
  source 1..19: mol_type = other RNA
tatttttcctttttccgta

SEQ ID NO: 314 - RNA, 19 nt, synthetic construct
  source 1..19: mol_type = other RNA
atttttcctttttccgtaa

SEQ ID NO: 315 - RNA, 19 nt, synthetic construct
  source 1..19: mol_type = other RNA
tttttcctttttccgtaag

SEQ ID NO: 316 - RNA, 19 nt, synthetic construct
  source 1..19: mol_type = other RNA
ttttcctttttccgtaaga

SEQ ID NO: 317 - RNA, 19 nt, synthetic construct
  source 1..19: mol_type = other RNA
tttcctttttccgtaagac

SEQ ID NO: 318 - RNA, 19 nt, synthetic construct
  source 1..19: mol_type = other RNA
ttcctttttccgtaagact

SEQ ID NO: 319 - RNA, 19 nt, synthetic construct
  source 1..19: mol_type = other RNA
tcctttttccgtaagactc

SEQ ID NO: 320 - RNA, 19 nt, synthetic construct
  source 1..19: mol_type = other RNA
cctttttccgtaagactca

SEQ ID NO: 321 - RNA, 19 nt, synthetic construct
  source 1..19: mol_type = other RNA
ctttttccgtaagactcaa

SEQ ID NO: 322 - RNA, 19 nt, synthetic construct
  source 1..19: mol_type = other RNA
tttttccgtaagactcaaa

SEQ ID NO: 323 - RNA, 19 nt, synthetic construct
  source 1..19: mol_type = other RNA
ttttccgtaagactcaaaa

SEQ ID NO: 324 - RNA, 19 nt, synthetic construct
  source 1..19: mol_type = other RNA
tttccgtaagactcaaaag

SEQ ID NO: 325 - RNA, 19 nt, synthetic construct
  source 1..19: mol_type = other RNA
ttccgtaagactcaaaagt

SEQ ID NO: 326 - RNA, 19 nt, synthetic construct
  source 1..19: mol_type = other RNA
tccgtaagactcaaaagta

SEQ ID NO: 327 - RNA, 19 nt, synthetic construct
  source 1..19: mol_type = other RNA
ccgtaagactcaaaagtaa

SEQ ID NO: 328 - RNA, 19 nt, synthetic construct
  source 1..19: mol_type = other RNA
cgtaagactcaaaagtaat

SEQ ID NO: 329 - RNA, 19 nt, synthetic construct
  source 1..19: mol_type = other RNA
gtaagactcaaaagtaata

SEQ ID NO: 330 - RNA, 19 nt, synthetic construct
  source 1..19: mol_type = other RNA
taagactcaaaagtaatat

SEQ ID NO: 331 - RNA, 19 nt, synthetic construct
  source 1..19: mol_type = other RNA
aagactcaaaagtaatata

SEQ ID NO: 332 - RNA, 19 nt, synthetic construct
  source 1..19: mol_type = other RNA
agactcaaaagtaatataa

SEQ ID NO: 333 - RNA, 19 nt, synthetic construct
  source 1..19: mol_type = other RNA
gactcaaaagtaatataag

SEQ ID NO: 334 - RNA, 19 nt, synthetic construct
  source 1..19: mol_type = other RNA
actcaaaagtaatataagg

SEQ ID NO: 335 - RNA, 19 nt, synthetic construct
  source 1..19: mol_type = other RNA
ctcaaaagtaatataaggt

SEQ ID NO: 336 - RNA, 19 nt, synthetic construct
  source 1..19: mol_type = other RNA
tcaaaagtaatataaggtc

SEQ ID NO: 337 - RNA, 19 nt, synthetic construct
  source 1..19: mol_type = other RNA
caaaagtaatataaggtct

SEQ ID NO: 338 - RNA, 19 nt, synthetic construct
  source 1..19: mol_type = other RNA
aaaagtaatataaggtcta

SEQ ID NO: 339 - RNA, 19 nt, synthetic construct
  source 1..19: mol_type = other RNA
aaagtaatataaggtctac

SEQ ID NO: 340 - RNA, 19 nt, synthetic construct
  source 1..19: mol_type = other RNA
aagtaatataaggtctaca

SEQ ID NO: 341 - RNA, 19 nt, synthetic construct
  source 1..19: mol_type = other RNA
agtaatataaggtctacaa

SEQ ID NO: 342 - RNA, 19 nt, synthetic construct
  source 1..19: mol_type = other RNA
gtaatataaggtctacaaa

SEQ ID NO: 343 - RNA, 19 nt, synthetic construct
  source 1..19: mol_type = other RNA
taatataaggtctacaaaa

SEQ ID NO: 344 - RNA, 19 nt, synthetic construct
  source 1..19: mol_type = other RNA
aatataaggtctacaaaat

SEQ ID NO: 345 - RNA, 19 nt, synthetic construct
  source 1..19: mol_type = other RNA
atataaggtctacaaaatc

SEQ ID NO: 346 - RNA, 19 nt, synthetic construct
  source 1..19: mol_type = other RNA
tataaggtctacaaaatct

SEQ ID NO: 347 - RNA, 19 nt, synthetic construct
  source 1..19: mol_type = other RNA
ataaggtctacaaaatcta

SEQ ID NO: 348 - RNA, 19 nt, synthetic construct
  source 1..19: mol_type = other RNA
taaggtctacaaaatctac

SEQ ID NO: 349 - RNA, 19 nt, synthetic construct
  source 1..19: mol_type = other RNA
aaggtctacaaaatctact

SEQ ID NO: 350 - RNA, 19 nt, synthetic construct
  source 1..19: mol_type = other RNA
aggtctacaaaatctacta

SEQ ID NO: 351 - RNA, 19 nt, synthetic construct
  source 1..19: mol_type = other RNA
ggtctacaaaatctactaa

SEQ ID NO: 352 - RNA, 19 nt, synthetic construct
  source 1..19: mol_type = other RNA
gtctacaaaatctactaaa

SEQ ID NO: 353 - RNA, 19 nt, synthetic construct
  source 1..19: mol_type = other RNA
tctacaaaatctactaaaa

SEQ ID NO: 354 - RNA, 19 nt, synthetic construct
  source 1..19: mol_type = other RNA
ctacaaaatctactaaaaa

SEQ ID NO: 355 - RNA, 19 nt, synthetic construct
  source 1..19: mol_type = other RNA
tacaaaatctactaaaaag

SEQ ID NO: 356 - RNA, 19 nt, synthetic construct
  source 1..19: mol_type = other RNA
acaaaatctactaaaaagt

SEQ ID NO: 357 - RNA, 19 nt, synthetic construct
  source 1..19: mol_type = other RNA
caaaatctactaaaaagtc

SEQ ID NO: 358 - RNA, 19 nt, synthetic construct
  source 1..19: mol_type = other RNA
aaaatctactaaaaagtct

SEQ ID NO: 359 - RNA, 19 nt, synthetic construct
  source 1..19: mol_type = other RNA
aaatctactaaaaagtctc

SEQ ID NO: 360 - RNA, 19 nt, synthetic construct
  source 1..19: mol_type = other RNA
aatctactaaaaagtctct

SEQ ID NO: 361 - RNA, 19 nt, synthetic construct
  source 1..19: mol_type = other RNA
atctactaaaaagtctctg

SEQ ID NO: 362 - RNA, 19 nt, synthetic construct
  source 1..19: mol_type = other RNA
tctactaaaaagtctctgc

SEQ ID NO: 363 - RNA, 19 nt, synthetic construct
  source 1..19: mol_type = other RNA
ctactaaaaagtctctgca

SEQ ID NO: 364 - RNA, 19 nt, synthetic construct
  source 1..19: mol_type = other RNA
tactaaaaagtctctgcaa

SEQ ID NO: 365 - RNA, 19 nt, synthetic construct
  source 1..19: mol_type = other RNA
actaaaaagtctctgcaaa

SEQ ID NO: 366 - RNA, 19 nt, synthetic construct
  source 1..19: mol_type = other RNA
ctaaaaagtctctgcaaaa

SEQ ID NO: 367 - RNA, 19 nt, synthetic construct
  source 1..19: mol_type = other RNA
taaaaagtctctgcaaaaa

SEQ ID NO: 368 - RNA, 19 nt, synthetic construct
  source 1..19: mol_type = other RNA
aaaaagtctctgcaaaaag

SEQ ID NO: 369 - RNA, 19 nt, synthetic construct
  source 1..19: mol_type = other RNA
aaaagtctctgcaaaaagt

SEQ ID NO: 370 - RNA, 19 nt, synthetic construct
  source 1..19: mol_type = other RNA
aaagtctctgcaaaaagta

SEQ ID NO: 371 - RNA, 19 nt, synthetic construct
  source 1..19: mol_type = other RNA
aagtctctgcaaaaagtag

SEQ ID NO: 372 - RNA, 19 nt, synthetic construct
  source 1..19: mol_type = other RNA
agtctctgcaaaaagtaga

SEQ ID NO: 373 - RNA, 19 nt, synthetic construct
  source 1..19: mol_type = other RNA
gtctctgcaaaaagtagat

SEQ ID NO: 374 - RNA, 19 nt, synthetic construct
  source 1..19: mol_type = other RNA
tctctgcaaaaagtagatg

SEQ ID NO: 375 - RNA, 19 nt, synthetic construct
  source 1..19: mol_type = other RNA
ctctgcaaaaagtagatga

SEQ ID NO: 376 - RNA, 19 nt, synthetic construct
  source 1..19: mol_type = other RNA
tctgcaaaaagtagatgaa

SEQ ID NO: 377 - RNA, 19 nt, synthetic construct
  source 1..19: mol_type = other RNA
ctgcaaaaagtagatgaag

SEQ ID NO: 378 - RNA, 19 nt, synthetic construct
  source 1..19: mol_type = other RNA
tgcaaaaagtagatgaaga

SEQ ID NO: 379 - RNA, 19 nt, synthetic construct
  source 1..19: mol_type = other RNA
gcaaaaagtagatgaagag

SEQ ID NO: 380 - RNA, 19 nt, synthetic construct
  source 1..19: mol_type = other RNA
caaaaagtagatgaagagg

SEQ ID NO: 381 - RNA, 19 nt, synthetic construct
  source 1..19: mol_type = other RNA
aaaaagtagatgaagagga

SEQ ID NO: 382 - RNA, 19 nt, synthetic construct
  source 1..19: mol_type = other RNA
aaaagtagatgaagaggac

SEQ ID NO: 383 - RNA, 19 nt, synthetic construct
  source 1..19: mol_type = other RNA
aaagtagatgaagaggact

SEQ ID NO: 384 - RNA, 19 nt, synthetic construct
  source 1..19: mol_type = other RNA
aagtagatgaagaggactc

SEQ ID NO: 385 - RNA, 19 nt, synthetic construct
  source 1..19: mol_type = other RNA
agtagatgaagaggactct

SEQ ID NO: 386 - RNA, 19 nt, synthetic construct
  source 1..19: mol_type = other RNA
gtagatgaagaggactctg

SEQ ID NO: 387 - RNA, 19 nt, synthetic construct
  source 1..19: mol_type = other RNA
tagatgaagaggactctga

SEQ ID NO: 388 - RNA, 19 nt, synthetic construct
  source 1..19: mol_type = other RNA
agatgaagaggactctgat

SEQ ID NO: 389 - RNA, 19 nt, synthetic construct
  source 1..19: mol_type = other RNA
gatgaagaggactctgatg

SEQ ID NO: 390 - RNA, 19 nt, synthetic construct
  source 1..19: mol_type = other RNA
atgaagaggactctgatga

SEQ ID NO: 391 - RNA, 19 nt, synthetic construct
  source 1..19: mol_type = other RNA
tgaagaggactctgatgaa

SEQ ID NO: 392 - RNA, 19 nt, synthetic construct
  source 1..19: mol_type = other RNA
gaagaggactctgatgaag

SEQ ID NO: 393 - RNA, 19 nt, synthetic construct
  source 1..19: mol_type = other RNA
aagaggactctgatgaaga

SEQ ID NO: 394 - RNA, 19 nt, synthetic construct
  source 1..19: mol_type = other RNA
agaggactctgatgaagaa

SEQ ID NO: 395 - RNA, 19 nt, synthetic construct
  source 1..19: mol_type = other RNA
gaggactctgatgaagaaa

SEQ ID NO: 396 - RNA, 19 nt, synthetic construct
  source 1..19: mol_type = other RNA
aggactctgatgaagaaag

SEQ ID NO: 397 - RNA, 19 nt, synthetic construct
  source 1..19: mol_type = other RNA
ggactctgatgaagaaagc

SEQ ID NO: 398 - RNA, 19 nt, synthetic construct
  source 1..19: mol_type = other RNA
gactctgatgaagaaagcc

SEQ ID NO: 399 - RNA, 19 nt, synthetic construct
  source 1..19: mol_type = other RNA
actctgatgaagaaagcca

SEQ ID NO: 400 - RNA, 19 nt, synthetic construct
  source 1..19: mol_type = other RNA
ctctgatgaagaaagccat

SEQ ID NO: 401 - RNA, 19 nt, synthetic construct
  source 1..19: mol_type = other RNA
tctgatgaagaaagccatc

SEQ ID NO: 402 - RNA, 19 nt, synthetic construct
  source 1..19: mol_type = other RNA
ctgatgaagaaagccatca

SEQ ID NO: 403 - RNA, 19 nt, synthetic construct
  source 1..19: mol_type = other RNA
tgatgaagaaagccatcat

SEQ ID NO: 404 - RNA, 19 nt, synthetic construct
  source 1..19: mol_type = other RNA
gatgaagaaagccatcatg

SEQ ID NO: 405 - RNA, 19 nt, synthetic construct
  source 1..19: mol_type = other RNA
atgaagaaagccatcatga

SEQ ID NO: 406 - RNA, 19 nt, synthetic construct
  source 1..19: mol_type = other RNA
tgaagaaagccatcatgat

SEQ ID NO: 407 - RNA, 19 nt, synthetic construct
  source 1..19: mol_type = other RNA
gaagaaagccatcatgatg

SEQ ID NO: 408 - RNA, 19 nt, synthetic construct
  source 1..19: mol_type = other RNA
aagaaagccatcatgatga

SEQ ID NO: 409 - RNA, 19 nt, synthetic construct
  source 1..19: mol_type = other RNA
agaaagccatcatgatgag

SEQ ID NO: 410 - RNA, 19 nt, synthetic construct
  source 1..19: mol_type = other RNA
gaaagccatcatgatgaga

SEQ ID NO: 411 - RNA, 19 nt, synthetic construct
  source 1..19: mol_type = other RNA
aaagccatcatgatgagat

SEQ ID NO: 412 - RNA, 19 nt, synthetic construct
  source 1..19: mol_type = other RNA
aagccatcatgatgagatg

SEQ ID NO: 413 - RNA, 19 nt, synthetic construct
  source 1..19: mol_type = other RNA
agccatcatgatgagatga

SEQ ID NO: 414 - RNA, 19 nt, synthetic construct
  source 1..19: mol_type = other RNA
gccatcatgatgagatgag

SEQ ID NO: 415 - RNA, 19 nt, synthetic construct
  source 1..19: mol_type = other RNA
ccatcatgatgagatgagt

SEQ ID NO: 416 - RNA, 19 nt, synthetic construct
  source 1..19: mol_type = other RNA
catcatgatgagatgagtg

SEQ ID NO: 417 - RNA, 19 nt, synthetic construct
  source 1..19: mol_type = other RNA
atcatgatgagatgagtga

SEQ ID NO: 418 - RNA, 19 nt, synthetic construct
  source 1..19: mol_type = other RNA
tcatgatgagatgagtgag

SEQ ID NO: 419 - RNA, 19 nt, synthetic construct
  source 1..19: mol_type = other RNA
catgatgagatgagtgagc

SEQ ID NO: 420 - RNA, 19 nt, synthetic construct
  source 1..19: mol_type = other RNA
atgatgagatgagtgagca

SEQ ID NO: 421 - RNA, 19 nt, synthetic construct
  source 1..19: mol_type = other RNA
tgatgagatgagtgagcag

SEQ ID NO: 422 - RNA, 19 nt, synthetic construct
  source 1..19: mol_type = other RNA
gatgagatgagtgagcagg

SEQ ID NO: 423 - RNA, 19 nt, synthetic construct
  source 1..19: mol_type = other RNA
atgagatgagtgagcagga

SEQ ID NO: 424 - RNA, 19 nt, synthetic construct
  source 1..19: mol_type = other RNA
tgagatgagtgagcaggaa

SEQ ID NO: 425 - RNA, 19 nt, synthetic construct
  source 1..19: mol_type = other RNA
gagatgagtgagcaggaag

SEQ ID NO: 426 - RNA, 19 nt, synthetic construct
  source 1..19: mol_type = other RNA
agatgagtgagcaggaaga

SEQ ID NO: 427 - RNA, 19 nt, synthetic construct
  source 1..19: mol_type = other RNA
gatgagtgagcaggaagag

SEQ ID NO: 428 - RNA, 19 nt, synthetic construct
  source 1..19: mol_type = other RNA
atgagtgagcaggaagagg

SEQ ID NO: 429 - RNA, 19 nt, synthetic construct
  source 1..19: mol_type = other RNA
tgagtgagcaggaagagga

SEQ ID NO: 430 - RNA, 19 nt, synthetic construct
  source 1..19: mol_type = other RNA
gagtgagcaggaagaggag

SEQ ID NO: 431 - RNA, 19 nt, synthetic construct
  source 1..19: mol_type = other RNA
agtgagcaggaagaggagc

SEQ ID NO: 432 - RNA, 19 nt, synthetic construct
  source 1..19: mol_type = other RNA
gtgagcaggaagaggagct

SEQ ID NO: 433 - RNA, 19 nt, synthetic construct
  source 1..19: mol_type = other RNA
tgagcaggaagaggagctt

SEQ ID NO: 434 - RNA, 19 nt, synthetic construct
  source 1..19: mol_type = other RNA
gagcaggaagaggagcttg

SEQ ID NO: 435 - RNA, 19 nt, synthetic construct
  source 1..19: mol_type = other RNA
agcaggaagaggagcttga

SEQ ID NO: 436 - RNA, 19 nt, synthetic construct
  source 1..19: mol_type = other RNA
gcaggaagaggagcttgag

SEQ ID NO: 437 - RNA, 19 nt, synthetic construct
  source 1..19: mol_type = other RNA
caggaagaggagcttgagg

SEQ ID NO: 438 - RNA, 19 nt, synthetic construct
  source 1..19: mol_type = other RNA
aggaagaggagcttgagga

SEQ ID NO: 439 - RNA, 19 nt, synthetic construct
  source 1..19: mol_type = other RNA
ggaagaggagcttgaggat

SEQ ID NO: 440 - RNA, 19 nt, synthetic construct
  source 1..19: mol_type = other RNA
gaagaggagcttgaggatg

SEQ ID NO: 441 - RNA, 19 nt, synthetic construct
  source 1..19: mol_type = other RNA
aagaggagcttgaggatga

SEQ ID NO: 442 - RNA, 19 nt, synthetic construct
  source 1..19: mol_type = other RNA
agaggagcttgaggatgat

SEQ ID NO: 443 - RNA, 19 nt, synthetic construct
  source 1..19: mol_type = other RNA
gaggagcttgaggatgatc

SEQ ID NO: 444 - RNA, 19 nt, synthetic construct
  source 1..19: mol_type = other RNA
aggagcttgaggatgatcc

SEQ ID NO: 445 - RNA, 19 nt, synthetic construct
  source 1..19: mol_type = other RNA
ggagcttgaggatgatcct

SEQ ID NO: 446 - RNA, 19 nt, synthetic construct
  source 1..19: mol_type = other RNA
gagcttgaggatgatccta

SEQ ID NO: 447 - RNA, 19 nt, synthetic construct
  source 1..19: mol_type = other RNA
agcttgaggatgatcctac

SEQ ID NO: 448 - RNA, 19 nt, synthetic construct
  source 1..19: mol_type = other RNA
gcttgaggatgatcctact

SEQ ID NO: 449 - RNA, 19 nt, synthetic construct
  source 1..19: mol_type = other RNA
cttgaggatgatcctactg

SEQ ID NO: 450 - RNA, 19 nt, synthetic construct
  source 1..19: mol_type = other RNA
ttgaggatgatcctactgt

SEQ ID NO: 451 - RNA, 19 nt, synthetic construct
  source 1..19: mol_type = other RNA
tgaggatgatcctactgta

SEQ ID NO: 452 - RNA, 19 nt, synthetic construct
  source 1..19: mol_type = other RNA
gaggatgatcctactgtag

SEQ ID NO: 453 - RNA, 19 nt, synthetic construct
  source 1..19: mol_type = other RNA
aggatgatcctactgtagt

SEQ ID NO: 454 - RNA, 19 nt, synthetic construct
  source 1..19: mol_type = other RNA
ggatgatcctactgtagtc

SEQ ID NO: 455 - RNA, 19 nt, synthetic construct
  source 1..19: mol_type = other RNA
gatgatcctactgtagtca

SEQ ID NO: 456 - RNA, 19 nt, synthetic construct
  source 1..19: mol_type = other RNA
atgatcctactgtagtcaa

SEQ ID NO: 457 - RNA, 19 nt, synthetic construct
  source 1..19: mol_type = other RNA
tgatcctactgtagtcaaa

SEQ ID NO: 458 - RNA, 19 nt, synthetic construct
  source 1..19: mol_type = other RNA
gatcctactgtagtcaaaa

SEQ ID NO: 459 - RNA, 19 nt, synthetic construct
  source 1..19: mol_type = other RNA
atcctactgtagtcaaaaa

SEQ ID NO: 460 - RNA, 19 nt, synthetic construct
  source 1..19: mol_type = other RNA
tcctactgtagtcaaaaac

SEQ ID NO: 461 - RNA, 19 nt, synthetic construct
  source 1..19: mol_type = other RNA
cctactgtagtcaaaaact

SEQ ID NO: 462 - RNA, 19 nt, synthetic construct
  source 1..19: mol_type = other RNA
ctactgtagtcaaaaacta

SEQ ID NO: 463 - RNA, 19 nt, synthetic construct
  source 1..19: mol_type = other RNA
tactgtagtcaaaaactat

SEQ ID NO: 464 - RNA, 19 nt, synthetic construct
  source 1..19: mol_type = other RNA
actgtagtcaaaaactata

SEQ ID NO: 465 - RNA, 19 nt, synthetic construct
  source 1..19: mol_type = other RNA
ctgtagtcaaaaactataa

SEQ ID NO: 466 - RNA, 19 nt, synthetic construct
  source 1..19: mol_type = other RNA
tgtagtcaaaaactataaa

SEQ ID NO: 467 - RNA, 19 nt, synthetic construct
  source 1..19: mol_type = other RNA
gtagtcaaaaactataaag

SEQ ID NO: 468 - RNA, 19 nt, synthetic construct
  source 1..19: mol_type = other RNA
tagtcaaaaactataaaga

SEQ ID NO: 469 - RNA, 19 nt, synthetic construct
  source 1..19: mol_type = other RNA
agtcaaaaactataaagac

SEQ ID NO: 470 - RNA, 19 nt, synthetic construct
  source 1..19: mol_type = other RNA
gtcaaaaactataaagacc

SEQ ID NO: 471 - RNA, 19 nt, synthetic construct
  source 1..19: mol_type = other RNA
tcaaaaactataaagacct

SEQ ID NO: 472 - RNA, 19 nt, synthetic construct
  source 1..19: mol_type = other RNA
caaaaactataaagacctg

SEQ ID NO: 473 - RNA, 19 nt, synthetic construct
  source 1..19: mol_type = other RNA
aaaaactataaagacctgg

SEQ ID NO: 474 - RNA, 19 nt, synthetic construct
  source 1..19: mol_type = other RNA
aaaactataaagacctgga

SEQ ID NO: 475 - RNA, 19 nt, synthetic construct
  source 1..19: mol_type = other RNA
aaactataaagacctggaa

SEQ ID NO: 476 - RNA, 19 nt, synthetic construct
  source 1..19: mol_type = other RNA
aactataaagacctggaaa

SEQ ID NO: 477 - RNA, 19 nt, synthetic construct
  source 1..19: mol_type = other RNA
actataaagacctggaaaa

SEQ ID NO: 478 - RNA, 19 nt, synthetic construct
  source 1..19: mol_type = other RNA
ctataaagacctggaaaaa

SEQ ID NO: 479 - RNA, 19 nt, synthetic construct
  source 1..19: mol_type = other RNA
tataaagacctggaaaaag

SEQ ID NO: 480 - RNA, 19 nt, synthetic construct
  source 1..19: mol_type = other RNA
ataaagacctggaaaaagc

SEQ ID NO: 481 - RNA, 19 nt, synthetic construct
  source 1..19: mol_type = other RNA
taaagacctggaaaaagca

SEQ ID NO: 482 - RNA, 19 nt, synthetic construct
  source 1..19: mol_type = other RNA
aaagacctggaaaaagcag

SEQ ID NO: 483 - RNA, 19 nt, synthetic construct
  source 1..19: mol_type = other RNA
aagacctggaaaaagcagt

SEQ ID NO: 484 - RNA, 19 nt, synthetic construct
  source 1..19: mol_type = other RNA
agacctggaaaaagcagtt

SEQ ID NO: 485 - RNA, 19 nt, synthetic construct
  source 1..19: mol_type = other RNA
gacctggaaaaagcagttc

SEQ ID NO: 486 - RNA, 19 nt, synthetic construct
  source 1..19: mol_type = other RNA
acctggaaaaagcagttca

SEQ ID NO: 487 - RNA, 19 nt, synthetic construct
  source 1..19: mol_type = other RNA
cctggaaaaagcagttcag

SEQ ID NO: 488 - RNA, 19 nt, synthetic construct
  source 1..19: mol_type = other RNA
ctggaaaaagcagttcagt

SEQ ID NO: 489 - RNA, 19 nt, synthetic construct
  source 1..19: mol_type = other RNA
tggaaaaagcagttcagtc

SEQ ID NO: 490 - RNA, 19 nt, synthetic construct
  source 1..19: mol_type = other RNA
ggaaaaagcagttcagtct

SEQ ID NO: 491 - RNA, 19 nt, synthetic construct
  source 1..19: mol_type = other RNA
gaaaaagcagttcagtctt

SEQ ID NO: 492 - RNA, 19 nt, synthetic construct
  source 1..19: mol_type = other RNA
aaaaagcagttcagtcttt

SEQ ID NO: 493 - RNA, 19 nt, synthetic construct
  source 1..19: mol_type = other RNA
aaaagcagttcagtctttt

SEQ ID NO: 494 - RNA, 19 nt, synthetic construct
  source 1..19: mol_type = other RNA
aaagcagttcagtcttttc

SEQ ID NO: 495 - RNA, 19 nt, synthetic construct
  source 1..19: mol_type = other RNA
aagcagttcagtcttttcg

SEQ ID NO: 496 - RNA, 19 nt, synthetic construct
  source 1..19: mol_type = other RNA
agcagttcagtcttttcgg

SEQ ID NO: 497 - RNA, 19 nt, synthetic construct
  source 1..19: mol_type = other RNA
gcagttcagtcttttcggt

SEQ ID NO: 498 - RNA, 19 nt, synthetic construct
  source 1..19: mol_type = other RNA
cagttcagtcttttcggta

SEQ ID NO: 499 - RNA, 19 nt, synthetic construct
  source 1..19: mol_type = other RNA
agttcagtcttttcggtat

SEQ ID NO: 500 - RNA, 19 nt, synthetic construct
  source 1..19: mol_type = other RNA
gttcagtcttttcggtatg

SEQ ID NO: 501 - RNA, 19 nt, synthetic construct
  source 1..19: mol_type = other RNA
ttcagtcttttcggtatga

SEQ ID NO: 502 - RNA, 19 nt, synthetic construct
  source 1..19: mol_type = other RNA
tcagtcttttcggtatgat

SEQ ID NO: 503 - RNA, 19 nt, synthetic construct
  source 1..19: mol_type = other RNA
cagtcttttcggtatgatg

SEQ ID NO: 504 - RNA, 19 nt, synthetic construct
  source 1..19: mol_type = other RNA
agtcttttcggtatgatgt

SEQ ID NO: 505 - RNA, 19 nt, synthetic construct
  source 1..19: mol_type = other RNA
gtcttttcggtatgatgtt

SEQ ID NO: 506 - RNA, 19 nt, synthetic construct
  source 1..19: mol_type = other RNA
tcttttcggtatgatgttg

SEQ ID NO: 507 - RNA, 19 nt, synthetic construct
  source 1..19: mol_type = other RNA
cttttcggtatgatgttgt

SEQ ID NO: 508 - RNA, 19 nt, synthetic construct
  source 1..19: mol_type = other RNA
ttttcggtatgatgttgtc

SEQ ID NO: 509 - RNA, 19 nt, synthetic construct
  source 1..19: mol_type = other RNA
tttcggtatgatgttgtcc

SEQ ID NO: 510 - RNA, 19 nt, synthetic construct
  source 1..19: mol_type = other RNA
ttcggtatgatgttgtcct

SEQ ID NO: 511 - RNA, 19 nt, synthetic construct
  source 1..19: mol_type = other RNA
tcggtatgatgttgtcctg

SEQ ID NO: 512 - RNA, 19 nt, synthetic construct
  source 1..19: mol_type = other RNA
cggtatgatgttgtcctga

SEQ ID NO: 513 - RNA, 19 nt, synthetic construct
  source 1..19: mol_type = other RNA
ggtatgatgttgtcctgaa

SEQ ID NO: 514 - RNA, 19 nt, synthetic construct
  source 1..19: mol_type = other RNA
gtatgatgttgtcctgaag

SEQ ID NO: 515 - RNA, 19 nt, synthetic construct
  source 1..19: mol_type = other RNA
tatgatgttgtcctgaaga

SEQ ID NO: 516 - RNA, 19 nt, synthetic construct
  source 1..19: mol_type = other RNA
atgatgttgtcctgaagac

SEQ ID NO: 517 - RNA, 19 nt, synthetic construct
  source 1..19: mol_type = other RNA
tgatgttgtcctgaagacg

SEQ ID NO: 518 - RNA, 19 nt, synthetic construct
  source 1..19: mol_type = other RNA
gatgttgtcctgaagacgg

SEQ ID NO: 519 - RNA, 19 nt, synthetic construct
  source 1..19: mol_type = other RNA
atgttgtcctgaagacggg

SEQ ID NO: 520 - RNA, 19 nt, synthetic construct
  source 1..19: mol_type = other RNA
tgttgtcctgaagacgggg

SEQ ID NO: 521 - RNA, 19 nt, synthetic construct
  source 1..19: mol_type = other RNA
gttgtcctgaagacggggc

SEQ ID NO: 522 - RNA, 19 nt, synthetic construct
  source 1..19: mol_type = other RNA
ttgtcctgaagacggggct

SEQ ID NO: 523 - RNA, 19 nt, synthetic construct
  source 1..19: mol_type = other RNA
tgtcctgaagacggggcta

SEQ ID NO: 524 - RNA, 19 nt, synthetic construct
  source 1..19: mol_type = other RNA
gtcctgaagacggggctag

SEQ ID NO: 525 - RNA, 19 nt, synthetic construct
  source 1..19: mol_type = other RNA
tcctgaagacggggctaga

SEQ ID NO: 526 - RNA, 19 nt, synthetic construct
  source 1..19: mol_type = other RNA
cctgaagacggggctagat

SEQ ID NO: 527 - RNA, 19 nt, synthetic construct
  source 1..19: mol_type = other RNA
ctgaagacggggctagata

SEQ ID NO: 528 - RNA, 19 nt, synthetic construct
  source 1..19: mol_type = other RNA
tgaagacggggctagatat

SEQ ID NO: 529 - RNA, 19 nt, synthetic construct
  source 1..19: mol_type = other RNA
gaagacggggctagatatt

SEQ ID NO: 530 - RNA, 19 nt, synthetic construct
  source 1..19: mol_type = other RNA
aagacggggctagatattg

SEQ ID NO: 531 - RNA, 19 nt, synthetic construct
  source 1..19: mol_type = other RNA
agacggggctagatattgg

SEQ ID NO: 532 - RNA, 19 nt, synthetic construct
  source 1..19: mol_type = other RNA
gacggggctagatattggg

SEQ ID NO: 533 - RNA, 19 nt, synthetic construct
  source 1..19: mol_type = other RNA
acggggctagatattggga

SEQ ID NO: 534 - RNA, 19 nt, synthetic construct
  source 1..19: mol_type = other RNA
cggggctagatattgggag

SEQ ID NO: 535 - RNA, 19 nt, synthetic construct
  source 1..19: mol_type = other RNA
ggggctagatattgggaga

SEQ ID NO: 536 - RNA, 19 nt, synthetic construct
  source 1..19: mol_type = other RNA
gggctagatattgggagaa

SEQ ID NO: 537 - RNA, 19 nt, synthetic construct
  source 1..19: mol_type = other RNA
ggctagatattgggagaaa

SEQ ID NO: 538 - RNA, 19 nt, synthetic construct
  source 1..19: mol_type = other RNA
gctagatattgggagaaac

SEQ ID NO: 539 - RNA, 19 nt, synthetic construct
  source 1..19: mol_type = other RNA
ctagatattgggagaaaca

SEQ ID NO: 540 - RNA, 19 nt, synthetic construct
  source 1..19: mol_type = other RNA
tagatattgggagaaacaa

SEQ ID NO: 541 - RNA, 19 nt, synthetic construct
  source 1..19: mol_type = other RNA
agatattgggagaaacaaa

SEQ ID NO: 542 - RNA, 19 nt, synthetic construct
  source 1..19: mol_type = other RNA
gatattgggagaaacaaag

SEQ ID NO: 543 - RNA, 19 nt, synthetic construct
  source 1..19: mol_type = other RNA
atattgggagaaacaaagt

SEQ ID NO: 544 - RNA, 19 nt, synthetic construct
  source 1..19: mol_type = other RNA
tattgggagaaacaaagtg

SEQ ID NO: 545 - RNA, 19 nt, synthetic construct
  source 1..19: mol_type = other RNA
attgggagaaacaaagtgg

SEQ ID NO: 546 - RNA, 19 nt, synthetic construct
  source 1..19: mol_type = other RNA
ttgggagaaacaaagtgga

SEQ ID NO: 547 - RNA, 19 nt, synthetic construct
  source 1..19: mol_type = other RNA
tgggagaaacaaagtggaa

SEQ ID NO: 548 - RNA, 19 nt, synthetic construct
  source 1..19: mol_type = other RNA
gggagaaacaaagtggaag

SEQ ID NO: 549 - RNA, 19 nt, synthetic construct
  source 1..19: mol_type = other RNA
ggagaaacaaagtggaaga

SEQ ID NO: 550 - RNA, 19 nt, synthetic construct
  source 1..19: mol_type = other RNA
gagaaacaaagtggaagat

SEQ ID NO: 551 - RNA, 19 nt, synthetic construct
  source 1..19: mol_type = other RNA
agaaacaaagtggaagatg

SEQ ID NO: 552 - RNA, 19 nt, synthetic construct
  source 1..19: mol_type = other RNA
gaaacaaagtggaagatgc

SEQ ID NO: 553 - RNA, 19 nt, synthetic construct
  source 1..19: mol_type = other RNA
aaacaaagtggaagatgct

SEQ ID NO: 554 - RNA, 19 nt, synthetic construct
  source 1..19: mol_type = other RNA
aacaaagtggaagatgctt

SEQ ID NO: 555 - RNA, 19 nt, synthetic construct
  source 1..19: mol_type = other RNA
acaaagtggaagatgcttt

SEQ ID NO: 556 - RNA, 19 nt, synthetic construct
  source 1..19: mol_type = other RNA
caaagtggaagatgctttc

SEQ ID NO: 557 - RNA, 19 nt, synthetic construct
  source 1..19: mol_type = other RNA
aaagtggaagatgctttct

SEQ ID NO: 558 - RNA, 19 nt, synthetic construct
  source 1..19: mol_type = other RNA
aagtggaagatgctttcta

SEQ ID NO: 559 - RNA, 19 nt, synthetic construct
  source 1..19: mol_type = other RNA
agtggaagatgctttctac

SEQ ID NO: 560 - RNA, 19 nt, synthetic construct
  source 1..19: mol_type = other RNA
gtggaagatgctttctaca

SEQ ID NO: 561 - RNA, 19 nt, synthetic construct
  source 1..19: mol_type = other RNA
tggaagatgctttctacaa

SEQ ID NO: 562 - RNA, 19 nt, synthetic construct
  source 1..19: mol_type = other RNA
ggaagatgctttctacaaa

SEQ ID NO: 563 - RNA, 19 nt, synthetic construct
  source 1..19: mol_type = other RNA
gaagatgctttctacaaag

SEQ ID NO: 564 - RNA, 19 nt, synthetic construct
  source 1..19: mol_type = other RNA
aagatgctttctacaaagg

SEQ ID NO: 565 - RNA, 19 nt, synthetic construct
  source 1..19: mol_type = other RNA
agatgctttctacaaaggt

SEQ ID NO: 566 - RNA, 19 nt, synthetic construct
  source 1..19: mol_type = other RNA
gatgctttctacaaaggtg

SEQ ID NO: 567 - RNA, 19 nt, synthetic construct
  source 1..19: mol_type = other RNA
atgctttctacaaaggtga

SEQ ID NO: 568 - RNA, 19 nt, synthetic construct
  source 1..19: mol_type = other RNA
tgctttctacaaaggtgaa

SEQ ID NO: 569 - RNA, 19 nt, synthetic construct
  source 1..19: mol_type = other RNA
gctttctacaaaggtgaac

SEQ ID NO: 570 - RNA, 19 nt, synthetic construct
  source 1..19: mol_type = other RNA
ctttctacaaaggtgaact

SEQ ID NO: 571 - RNA, 19 nt, synthetic construct
  source 1..19: mol_type = other RNA
tttctacaaaggtgaactc

SEQ ID NO: 572 - RNA, 19 nt, synthetic construct
  source 1..19: mol_type = other RNA
ttctacaaaggtgaactca

SEQ ID NO: 573 - RNA, 19 nt, synthetic construct
  source 1..19: mol_type = other RNA
tctacaaaggtgaactcag

SEQ ID NO: 574 - RNA, 19 nt, synthetic construct
  source 1..19: mol_type = other RNA
ctacaaaggtgaactcagg

SEQ ID NO: 575 - RNA, 19 nt, synthetic construct
  source 1..19: mol_type = other RNA
tacaaaggtgaactcaggc

SEQ ID NO: 576 - RNA, 19 nt, synthetic construct
  source 1..19: mol_type = other RNA
acaaaggtgaactcaggct

SEQ ID NO: 577 - RNA, 19 nt, synthetic construct
  source 1..19: mol_type = other RNA
caaaggtgaactcaggctg

SEQ ID NO: 578 - RNA, 19 nt, synthetic construct
  source 1..19: mol_type = other RNA
aaaggtgaactcaggctga

SEQ ID NO: 579 - RNA, 19 nt, synthetic construct
  source 1..19: mol_type = other RNA
aaggtgaactcaggctgaa

SEQ ID NO: 580 - RNA, 19 nt, synthetic construct
  source 1..19: mol_type = other RNA
aggtgaactcaggctgaat

SEQ ID NO: 581 - RNA, 19 nt, synthetic construct
  source 1..19: mol_type = other RNA
ggtgaactcaggctgaatg

SEQ ID NO: 582 - RNA, 19 nt, synthetic construct
  source 1..19: mol_type = other RNA
gtgaactcaggctgaatga

SEQ ID NO: 583 - RNA, 19 nt, synthetic construct
  source 1..19: mol_type = other RNA
tgaactcaggctgaatgag

SEQ ID NO: 584 - RNA, 19 nt, synthetic construct
  source 1..19: mol_type = other RNA
gaactcaggctgaatgagg

SEQ ID NO: 585 - RNA, 19 nt, synthetic construct
  source 1..19: mol_type = other RNA
aactcaggctgaatgagga

SEQ ID NO: 586 - RNA, 19 nt, synthetic construct
  source 1..19: mol_type = other RNA
actcaggctgaatgaggaa

SEQ ID NO: 587 - RNA, 19 nt, synthetic construct
  source 1..19: mol_type = other RNA
ctcaggctgaatgaggaaa

SEQ ID NO: 588 - RNA, 19 nt, synthetic construct
  source 1..19: mol_type = other RNA
tcaggctgaatgaggaaaa

SEQ ID NO: 589 - RNA, 19 nt, synthetic construct
  source 1..19: mol_type = other RNA
caggctgaatgaggaaaaa

SEQ ID NO: 590 - RNA, 19 nt, synthetic construct
  source 1..19: mol_type = other RNA
aggctgaatgaggaaaaat

SEQ ID NO: 591 - RNA, 19 nt, synthetic construct
  source 1..19: mol_type = other RNA
ggctgaatgaggaaaaatt

SEQ ID NO: 592 - RNA, 19 nt, synthetic construct
  source 1..19: mol_type = other RNA
gctgaatgaggaaaaatta

SEQ ID NO: 593 - RNA, 19 nt, synthetic construct
  source 1..19: mol_type = other RNA
ctgaatgaggaaaaattat

SEQ ID NO: 594 - RNA, 19 nt, synthetic construct
  source 1..19: mol_type = other RNA
tgaatgaggaaaaattatg

SEQ ID NO: 595 - RNA, 19 nt, synthetic construct
  source 1..19: mol_type = other RNA
gaatgaggaaaaattatgg

SEQ ID NO: 596 - RNA, 19 nt, synthetic construct
  source 1..19: mol_type = other RNA
aatgaggaaaaattatgga

SEQ ID NO: 597 - RNA, 19 nt, synthetic construct
  source 1..19: mol_type = other RNA
atgaggaaaaattatggaa

SEQ ID NO: 598 - RNA, 19 nt, synthetic construct
  source 1..19: mol_type = other RNA
tgaggaaaaattatggaag

SEQ ID NO: 599 - RNA, 19 nt, synthetic construct
  source 1..19: mol_type = other RNA
gaggaaaaattatggaaga

SEQ ID NO: 600 - RNA, 19 nt, synthetic construct
  source 1..19: mol_type = other RNA
aggaaaaattatggaagaa

SEQ ID NO: 601 - RNA, 19 nt, synthetic construct
  source 1..19: mol_type = other RNA
ggaaaaattatggaagaaa

SEQ ID NO: 602 - RNA, 19 nt, synthetic construct
  source 1..19: mol_type = other RNA
gaaaaattatggaagaaaa

SEQ ID NO: 603 - RNA, 19 nt, synthetic construct
  source 1..19: mol_type = other RNA
aaaaattatggaagaaaag

SEQ ID NO: 604 - RNA, 19 nt, synthetic construct
  source 1..19: mol_type = other RNA
aaaattatggaagaaaagc

SEQ ID NO: 605 - RNA, 19 nt, synthetic construct
  source 1..19: mol_type = other RNA
aaattatggaagaaaagca

SEQ ID NO: 606 - RNA, 19 nt, synthetic construct
  source 1..19: mol_type = other RNA
aattatggaagaaaagcag

SEQ ID NO: 607 - RNA, 19 nt, synthetic construct
  source 1..19: mol_type = other RNA
attatggaagaaaagcaga

SEQ ID NO: 608 - RNA, 19 nt, synthetic construct
  source 1..19: mol_type = other RNA
ttatggaagaaaagcagaa

SEQ ID NO: 609 - RNA, 19 nt, synthetic construct
  source 1..19: mol_type = other RNA
tatggaagaaaagcagaac

SEQ ID NO: 610 - RNA, 19 nt, synthetic construct
  source 1..19: mol_type = other RNA
atggaagaaaagcagaacg

SEQ ID NO: 611 - RNA, 19 nt, synthetic construct
  source 1..19: mol_type = other RNA
tggaagaaaagcagaacgg

SEQ ID NO: 612 - RNA, 19 nt, synthetic construct
  source 1..19: mol_type = other RNA
ggaagaaaagcagaacggt

SEQ ID NO: 613 - RNA, 19 nt, synthetic construct
  source 1..19: mol_type = other RNA
gaagaaaagcagaacggtg

SEQ ID NO: 614 - RNA, 19 nt, synthetic construct
  source 1..19: mol_type = other RNA
aagaaaagcagaacggtga

SEQ ID NO: 615 - RNA, 19 nt, synthetic construct
  source 1..19: mol_type = other RNA
agaaaagcagaacggtgaa

SEQ ID NO: 616 - RNA, 19 nt, synthetic construct
  source 1..19: mol_type = other RNA
gaaaagcagaacggtgaaa

SEQ ID NO: 617 - RNA, 19 nt, synthetic construct
  source 1..19: mol_type = other RNA
aaaagcagaacggtgaaag

SEQ ID NO: 618 - RNA, 19 nt, synthetic construct
  source 1..19: mol_type = other RNA
aaagcagaacggtgaaagt

SEQ ID NO: 619 - RNA, 19 nt, synthetic construct
  source 1..19: mol_type = other RNA
aagcagaacggtgaaagtg

SEQ ID NO: 620 - RNA, 19 nt, synthetic construct
  source 1..19: mol_type = other RNA
agcagaacggtgaaagtgg

SEQ ID NO: 621 - RNA, 19 nt, synthetic construct
  source 1..19: mol_type = other RNA
gcagaacggtgaaagtggg

SEQ ID NO: 622 - RNA, 19 nt, synthetic construct
  source 1..19: mol_type = other RNA
cagaacggtgaaagtggga

SEQ ID NO: 623 - RNA, 19 nt, synthetic construct
  source 1..19: mol_type = other RNA
agaacggtgaaagtgggag

SEQ ID NO: 624 - RNA, 19 nt, synthetic construct
  source 1..19: mol_type = other RNA
gaacggtgaaagtgggaga

SEQ ID NO: 625 - RNA, 19 nt, synthetic construct
  source 1..19: mol_type = other RNA
aacggtgaaagtgggagat

SEQ ID NO: 626 - RNA, 19 nt, synthetic construct
  source 1..19: mol_type = other RNA
acggtgaaagtgggagata

SEQ ID NO: 627 - RNA, 19 nt, synthetic construct
  source 1..19: mol_type = other RNA
cggtgaaagtgggagatac

SEQ ID NO: 628 - RNA, 19 nt, synthetic construct
  source 1..19: mol_type = other RNA
ggtgaaagtgggagataca

SEQ ID NO: 629 - RNA, 19 nt, synthetic construct
  source 1..19: mol_type = other RNA
gtgaaagtgggagatacat

SEQ ID NO: 630 - RNA, 19 nt, synthetic construct
  source 1..19: mol_type = other RNA
tgaaagtgggagatacatt

SEQ ID NO: 631 - RNA, 19 nt, synthetic construct
  source 1..19: mol_type = other RNA
gaaagtgggagatacattg

SEQ ID NO: 632 - RNA, 19 nt, synthetic construct
  source 1..19: mol_type = other RNA
aaagtgggagatacattgg

SEQ ID NO: 633 - RNA, 19 nt, synthetic construct
  source 1..19: mol_type = other RNA
aagtgggagatacattgga

SEQ ID NO: 634 - RNA, 19 nt, synthetic construct
  source 1..19: mol_type = other RNA
agtgggagatacattggat

SEQ ID NO: 635 - RNA, 19 nt, synthetic construct
  source 1..19: mol_type = other RNA
gtgggagatacattggatc

SEQ ID NO: 636 - RNA, 19 nt, synthetic construct
  source 1..19: mol_type = other RNA
tgggagatacattggatct

SEQ ID NO: 637 - RNA, 19 nt, synthetic construct
  source 1..19: mol_type = other RNA
gggagatacattggatctt

SEQ ID NO: 638 - RNA, 19 nt, synthetic construct
  source 1..19: mol_type = other RNA
ggagatacattggatcttc

SEQ ID NO: 639 - RNA, 19 nt, synthetic construct
  source 1..19: mol_type = other RNA
gagatacattggatcttct

SEQ ID NO: 640 - RNA, 19 nt, synthetic construct
  source 1..19: mol_type = other RNA
agatacattggatcttctc

SEQ ID NO: 641 - RNA, 19 nt, synthetic construct
  source 1..19: mol_type = other RNA
gatacattggatcttctca

SEQ ID NO: 642 - RNA, 19 nt, synthetic construct
  source 1..19: mol_type = other RNA
atacattggatcttctcat

SEQ ID NO: 643 - RNA, 19 nt, synthetic construct
  source 1..19: mol_type = other RNA
tacattggatcttctcatt

SEQ ID NO: 644 - RNA, 19 nt, synthetic construct
  source 1..19: mol_type = other RNA
acattggatcttctcattg

SEQ ID NO: 645 - RNA, 19 nt, synthetic construct
  source 1..19: mol_type = other RNA
cattggatcttctcattgg

SEQ ID NO: 646 - RNA, 19 nt, synthetic construct
  source 1..19: mol_type = other RNA
attggatcttctcattgga

SEQ ID NO: 647 - RNA, 19 nt, synthetic construct
  source 1..19: mol_type = other RNA
ttggatcttctcattggag

SEQ ID NO: 648 - RNA, 19 nt, synthetic construct
  source 1..19: mol_type = other RNA
tggatcttctcattggaga

SEQ ID NO: 649 - RNA, 19 nt, synthetic construct
  source 1..19: mol_type = other RNA
ggatcttctcattggagag

SEQ ID NO: 650 - RNA, 19 nt, synthetic construct
  source 1..19: mol_type = other RNA
gatcttctcattggagagg

SEQ ID NO: 651 - RNA, 19 nt, synthetic construct
  source 1..19: mol_type = other RNA
atcttctcattggagagga

SEQ ID NO: 652 - RNA, 19 nt, synthetic construct
  source 1..19: mol_type = other RNA
tcttctcattggagaggat

SEQ ID NO: 653 - RNA, 19 nt, synthetic construct
  source 1..19: mol_type = other RNA
cttctcattggagaggata

SEQ ID NO: 654 - RNA, 19 nt, synthetic construct
  source 1..19: mol_type = other RNA
ttctcattggagaggataa

SEQ ID NO: 655 - RNA, 19 nt, synthetic construct
  source 1..19: mol_type = other RNA
tctcattggagaggataaa

SEQ ID NO: 656 - RNA, 19 nt, synthetic construct
  source 1..19: mol_type = other RNA
ctcattggagaggataaag

SEQ ID NO: 657 - RNA, 19 nt, synthetic construct
  source 1..19: mol_type = other RNA
tcattggagaggataaaga

SEQ ID NO: 658 - RNA, 19 nt, synthetic construct
  source 1..19: mol_type = other RNA
cattggagaggataaagaa

SEQ ID NO: 659 - RNA, 19 nt, synthetic construct
  source 1..19: mol_type = other RNA
attggagaggataaagaag

SEQ ID NO: 660 - RNA, 19 nt, synthetic construct
  source 1..19: mol_type = other RNA
ttggagaggataaagaagc

SEQ ID NO: 661 - RNA, 19 nt, synthetic construct
  source 1..19: mol_type = other RNA
tggagaggataaagaagca

SEQ ID NO: 662 - RNA, 19 nt, synthetic construct
  source 1..19: mol_type = other RNA
ggagaggataaagaagcag

SEQ ID NO: 663 - RNA, 19 nt, synthetic construct
  source 1..19: mol_type = other RNA
gagaggataaagaagcagg

SEQ ID NO: 664 - RNA, 19 nt, synthetic construct
  source 1..19: mol_type = other RNA
agaggataaagaagcagga

SEQ ID NO: 665 - RNA, 19 nt, synthetic construct
  source 1..19: mol_type = other RNA
gaggataaagaagcaggaa

SEQ ID NO: 666 - RNA, 19 nt, synthetic construct
  source 1..19: mol_type = other RNA
aggataaagaagcaggaac

SEQ ID NO: 667 - RNA, 19 nt, synthetic construct
  source 1..19: mol_type = other RNA
ggataaagaagcaggaaca

SEQ ID NO: 668 - RNA, 19 nt, synthetic construct
  source 1..19: mol_type = other RNA
gataaagaagcaggaacag

SEQ ID NO: 669 - RNA, 19 nt, synthetic construct
  source 1..19: mol_type = other RNA
ataaagaagcaggaacaga

SEQ ID NO: 670 - RNA, 19 nt, synthetic construct
  source 1..19: mol_type = other RNA
taaagaagcaggaacagag

SEQ ID NO: 671 - RNA, 19 nt, synthetic construct
  source 1..19: mol_type = other RNA
aaagaagcaggaacagaga

SEQ ID NO: 672 - RNA, 19 nt, synthetic construct
  source 1..19: mol_type = other RNA
aagaagcaggaacagagac

SEQ ID NO: 673 - RNA, 19 nt, synthetic construct
  source 1..19: mol_type = other RNA
agaagcaggaacagagaca

SEQ ID NO: 674 - RNA, 19 nt, synthetic construct
  source 1..19: mol_type = other RNA
gaagcaggaacagagacag

SEQ ID NO: 675 - RNA, 19 nt, synthetic construct
  source 1..19: mol_type = other RNA
aagcaggaacagagacagt

SEQ ID NO: 676 - RNA, 19 nt, synthetic construct
  source 1..19: mol_type = other RNA
agcaggaacagagacagtt

SEQ ID NO: 677 - RNA, 19 nt, synthetic construct
  source 1..19: mol_type = other RNA
gcaggaacagagacagtta

SEQ ID NO: 678 - RNA, 19 nt, synthetic construct
  source 1..19: mol_type = other RNA
caggaacagagacagttat

SEQ ID NO: 679 - RNA, 19 nt, synthetic construct
  source 1..19: mol_type = other RNA
aggaacagagacagttatg

SEQ ID NO: 680 - RNA, 19 nt, synthetic construct
  source 1..19: mol_type = other RNA
ggaacagagacagttatgc

SEQ ID NO: 681 - RNA, 19 nt, synthetic construct
  source 1..19: mol_type = other RNA
gaacagagacagttatgcg

SEQ ID NO: 682 - RNA, 19 nt, synthetic construct
  source 1..19: mol_type = other RNA
aacagagacagttatgcgg

SEQ ID NO: 683 - RNA, 19 nt, synthetic construct
  source 1..19: mol_type = other RNA
acagagacagttatgcgga

SEQ ID NO: 684 - RNA, 19 nt, synthetic construct
  source 1..19: mol_type = other RNA
cagagacagttatgcggat

SEQ ID NO: 685 - RNA, 19 nt, synthetic construct
  source 1..19: mol_type = other RNA
agagacagttatgcggatt

SEQ ID NO: 686 - RNA, 19 nt, synthetic construct
  source 1..19: mol_type = other RNA
gagacagttatgcggattc

SEQ ID NO: 687 - RNA, 19 nt, synthetic construct
  source 1..19: mol_type = other RNA
agacagttatgcggattct

SEQ ID NO: 688 - RNA, 19 nt, synthetic construct
  source 1..19: mol_type = other RNA
gacagttatgcggattctc

SEQ ID NO: 689 - RNA, 19 nt, synthetic construct
  source 1..19: mol_type = other RNA
acagttatgcggattctct

SEQ ID NO: 690 - RNA, 19 nt, synthetic construct
  source 1..19: mol_type = other RNA
cagttatgcggattctctt

SEQ ID NO: 691 - RNA, 19 nt, synthetic construct
  source 1..19: mol_type = other RNA
agttatgcggattctcttg

SEQ ID NO: 692 - RNA, 19 nt, synthetic construct
  source 1..19: mol_type = other RNA
gttatgcggattctcttga

SEQ ID NO: 693 - RNA, 19 nt, synthetic construct
  source 1..19: mol_type = other RNA
ttatgcggattctcttgaa

SEQ ID NO: 694 - RNA, 19 nt, synthetic construct
  source 1..19: mol_type = other RNA
tatgcggattctcttgaaa

SEQ ID NO: 695 - RNA, 19 nt, synthetic construct
  source 1..19: mol_type = other RNA
atgcggattctcttgaaaa

SEQ ID NO: 696 - RNA, 19 nt, synthetic construct
  source 1..19: mol_type = other RNA
tgcggattctcttgaaaaa

SEQ ID NO: 697 - RNA, 19 nt, synthetic construct
  source 1..19: mol_type = other RNA
gcggattctcttgaaaaaa

SEQ ID NO: 698 - RNA, 19 nt, synthetic construct
  source 1..19: mol_type = other RNA
cggattctcttgaaaaaag

SEQ ID NO: 699 - RNA, 19 nt, synthetic construct
  source 1..19: mol_type = other RNA
ggattctcttgaaaaaagt

SEQ ID NO: 700 - RNA, 19 nt, synthetic construct
  source 1..19: mol_type = other RNA
gattctcttgaaaaaagtg

SEQ ID NO: 701 - RNA, 19 nt, synthetic construct
  source 1..19: mol_type = other RNA
attctcttgaaaaaagtgt

SEQ ID NO: 702 - RNA, 19 nt, synthetic construct
  source 1..19: mol_type = other RNA
ttctcttgaaaaaagtgtt

SEQ ID NO: 703 - RNA, 19 nt, synthetic construct
  source 1..19: mol_type = other RNA
tctcttgaaaaaagtgttt

SEQ ID NO: 704 - RNA, 19 nt, synthetic construct
  source 1..19: mol_type = other RNA
ctcttgaaaaaagtgtttg

SEQ ID NO: 705 - RNA, 19 nt, synthetic construct
  source 1..19: mol_type = other RNA
tcttgaaaaaagtgtttga

SEQ ID NO: 706 - RNA, 19 nt, synthetic construct
  source 1..19: mol_type = other RNA
cttgaaaaaagtgtttgaa

SEQ ID NO: 707 - RNA, 19 nt, synthetic construct
  source 1..19: mol_type = other RNA
ttgaaaaaagtgtttgaag

SEQ ID NO: 708 - RNA, 19 nt, synthetic construct
  source 1..19: mol_type = other RNA
tgaaaaaagtgtttgaaga

SEQ ID NO: 709 - RNA, 19 nt, synthetic construct
  source 1..19: mol_type = other RNA
gaaaaaagtgtttgaagag

SEQ ID NO: 710 - RNA, 19 nt, synthetic construct
  source 1..19: mol_type = other RNA
aaaaaagtgtttgaagaga

SEQ ID NO: 711 - RNA, 19 nt, synthetic construct
  source 1..19: mol_type = other RNA
aaaaagtgtttgaagagaa

SEQ ID NO: 712 - RNA, 19 nt, synthetic construct
  source 1..19: mol_type = other RNA
aaaagtgtttgaagagaag

SEQ ID NO: 713 - RNA, 19 nt, synthetic construct
  source 1..19: mol_type = other RNA
aaagtgtttgaagagaaga

SEQ ID NO: 714 - RNA, 19 nt, synthetic construct
  source 1..19: mol_type = other RNA
aagtgtttgaagagaagac

SEQ ID NO: 715 - RNA, 19 nt, synthetic construct
  source 1..19: mol_type = other RNA
agtgtttgaagagaagact

SEQ ID NO: 716 - RNA, 19 nt, synthetic construct
  source 1..19: mol_type = other RNA
gtgtttgaagagaagactg

SEQ ID NO: 717 - RNA, 19 nt, synthetic construct
  source 1..19: mol_type = other RNA
tgtttgaagagaagactga

SEQ ID NO: 718 - RNA, 19 nt, synthetic construct
  source 1..19: mol_type = other RNA
gtttgaagagaagactgaa

SEQ ID NO: 719 - RNA, 19 nt, synthetic construct
  source 1..19: mol_type = other RNA
tttgaagagaagactgaaa

SEQ ID NO: 720 - RNA, 19 nt, synthetic construct
  source 1..19: mol_type = other RNA
ttgaagagaagactgaaag

SEQ ID NO: 721 - RNA, 19 nt, synthetic construct
  source 1..19: mol_type = other RNA
tgaagagaagactgaaagt

SEQ ID NO: 722 - RNA, 19 nt, synthetic construct
  source 1..19: mol_type = other RNA
gaagagaagactgaaagtg

SEQ ID NO: 723 - RNA, 19 nt, synthetic construct
  source 1..19: mol_type = other RNA
aagagaagactgaaagtga

SEQ ID NO: 724 - RNA, 19 nt, synthetic construct
  source 1..19: mol_type = other RNA
agagaagactgaaagtgaa

SEQ ID NO: 725 - RNA, 19 nt, synthetic construct
  source 1..19: mol_type = other RNA
gagaagactgaaagtgaaa

SEQ ID NO: 726 - RNA, 19 nt, synthetic construct
  source 1..19: mol_type = other RNA
agaagactgaaagtgaaaa

SEQ ID NO: 727 - RNA, 19 nt, synthetic construct
  source 1..19: mol_type = other RNA
gaagactgaaagtgaaaaa

SEQ ID NO: 728 - RNA, 19 nt, synthetic construct
  source 1..19: mol_type = other RNA
aagactgaaagtgaaaaat

SEQ ID NO: 729 - RNA, 19 nt, synthetic construct
  source 1..19: mol_type = other RNA
agactgaaagtgaaaaata

SEQ ID NO: 730 - RNA, 19 nt, synthetic construct
  source 1..19: mol_type = other RNA
gactgaaagtgaaaaatac

SEQ ID NO: 731 - RNA, 19 nt, synthetic construct
  source 1..19: mol_type = other RNA
actgaaagtgaaaaataca

SEQ ID NO: 732 - RNA, 19 nt, synthetic construct
  source 1..19: mol_type = other RNA
ctgaaagtgaaaaatacag

SEQ ID NO: 733 - RNA, 19 nt, synthetic construct
  source 1..19: mol_type = other RNA
tgaaagtgaaaaatacaga

SEQ ID NO: 734 - RNA, 19 nt, synthetic construct
  source 1..19: mol_type = other RNA
gaaagtgaaaaatacagag

SEQ ID NO: 735 - RNA, 19 nt, synthetic construct
  source 1..19: mol_type = other RNA
aaagtgaaaaatacagagt

SEQ ID NO: 736 - RNA, 19 nt, synthetic construct
  source 1..19: mol_type = other RNA
aagtgaaaaatacagagtg

SEQ ID NO: 737 - RNA, 19 nt, synthetic construct
  source 1..19: mol_type = other RNA
agtgaaaaatacagagtgg

SEQ ID NO: 738 - RNA, 19 nt, synthetic construct
  source 1..19: mol_type = other RNA
gtgaaaaatacagagtggt

SEQ ID NO: 739 - RNA, 19 nt, synthetic construct
  source 1..19: mol_type = other RNA
tgaaaaatacagagtggtg

SEQ ID NO: 740 - RNA, 19 nt, synthetic construct
  source 1..19: mol_type = other RNA
gaaaaatacagagtggtgt

SEQ ID NO: 741 - RNA, 19 nt, synthetic construct
  source 1..19: mol_type = other RNA
aaaaatacagagtggtgtt

SEQ ID NO: 742 - RNA, 19 nt, synthetic construct
  source 1..19: mol_type = other RNA
aaaatacagagtggtgtta

SEQ ID NO: 743 - RNA, 19 nt, synthetic construct
  source 1..19: mol_type = other RNA
aaatacagagtggtgttac

SEQ ID NO: 744 - RNA, 19 nt, synthetic construct
  source 1..19: mol_type = other RNA
aatacagagtggtgttacg

SEQ ID NO: 745 - RNA, 19 nt, synthetic construct
  source 1..19: mol_type = other RNA
atacagagtggtgttacgg

SEQ ID NO: 746 - RNA, 19 nt, synthetic construct
  source 1..19: mol_type = other RNA
tacagagtggtgttacggc

SEQ ID NO: 747 - RNA, 19 nt, synthetic construct
  source 1..19: mol_type = other RNA
acagagtggtgttacggcg

SEQ ID NO: 748 - RNA, 19 nt, synthetic construct
  source 1..19: mol_type = other RNA
cagagtggtgttacggcgg

SEQ ID NO: 749 - RNA, 19 nt, synthetic construct
  source 1..19: mol_type = other RNA
agagtggtgttacggcggt

SEQ ID NO: 750 - RNA, 19 nt, synthetic construct
  source 1..19: mol_type = other RNA
gagtggtgttacggcggtg

SEQ ID NO: 751 - RNA, 19 nt, synthetic construct
  source 1..19: mol_type = other RNA
agtggtgttacggcggtgg

SEQ ID NO: 752 - RNA, 19 nt, synthetic construct
  source 1..19: mol_type = other RNA
gtggtgttacggcggtgga

SEQ ID NO: 753 - RNA, 19 nt, synthetic construct
  source 1..19: mol_type = other RNA
tggtgttacggcggtggaa

SEQ ID NO: 754 - RNA, 19 nt, synthetic construct
  source 1..19: mol_type = other RNA
ggtgttacggcggtggaaa

SEQ ID NO: 755 - RNA, 19 nt, synthetic construct
  source 1..19: mol_type = other RNA
gtgttacggcggtggaaaa

SEQ ID NO: 756 - RNA, 19 nt, synthetic construct
  source 1..19: mol_type = other RNA
tgttacggcggtggaaaag

SEQ ID NO: 757 - RNA, 19 nt, synthetic construct
  source 1..19: mol_type = other RNA
gttacggcggtggaaaagt

SEQ ID NO: 758 - RNA, 19 nt, synthetic construct
  source 1..19: mol_type = other RNA
ttacggcggtggaaaagtt

SEQ ID NO: 759 - RNA, 19 nt, synthetic construct
  source 1..19: mol_type = other RNA
tacggcggtggaaaagttt

SEQ ID NO: 760 - RNA, 19 nt, synthetic construct
  source 1..19: mol_type = other RNA
acggcggtggaaaagttta

SEQ ID NO: 761 - RNA, 19 nt, synthetic construct
  source 1..19: mol_type = other RNA
cggcggtggaaaagtttaa

SEQ ID NO: 762 - RNA, 19 nt, synthetic construct
  source 1..19: mol_type = other RNA
ggcggtggaaaagtttaaa

SEQ ID NO: 763 - RNA, 19 nt, synthetic construct
  source 1..19: mol_type = other RNA
gcggtggaaaagtttaaag

SEQ ID NO: 764 - RNA, 19 nt, synthetic construct
  source 1..19: mol_type = other RNA
cggtggaaaagtttaaagt

SEQ ID NO: 765 - RNA, 19 nt, synthetic construct
  source 1..19: mol_type = other RNA
ggtggaaaagtttaaagtt

SEQ ID NO: 766 - RNA, 19 nt, synthetic construct
  source 1..19: mol_type = other RNA
gtggaaaagtttaaagttg

SEQ ID NO: 767 - RNA, 19 nt, synthetic construct
  source 1..19: mol_type = other RNA
tggaaaagtttaaagttgc

SEQ ID NO: 768 - RNA, 19 nt, synthetic construct
  source 1..19: mol_type = other RNA
ggaaaagtttaaagttgcc

SEQ ID NO: 769 - RNA, 19 nt, synthetic construct
  source 1..19: mol_type = other RNA
gaaaagtttaaagttgcct

SEQ ID NO: 770 - RNA, 19 nt, synthetic construct
  source 1..19: mol_type = other RNA
aaaagtttaaagttgccta

SEQ ID NO: 771 - RNA, 19 nt, synthetic construct
  source 1..19: mol_type = other RNA
aaagtttaaagttgcctaa

SEQ ID NO: 772 - RNA, 19 nt, synthetic construct
  source 1..19: mol_type = other RNA
aagtttaaagttgcctaag

SEQ ID NO: 773 - RNA, 19 nt, synthetic construct
  source 1..19: mol_type = other RNA
agtttaaagttgcctaaga

SEQ ID NO: 774 - RNA, 19 nt, synthetic construct
  source 1..19: mol_type = other RNA
gtttaaagttgcctaagaa

SEQ ID NO: 775 - RNA, 19 nt, synthetic construct
  source 1..19: mol_type = other RNA
tttaaagttgcctaagaag

SEQ ID NO: 776 - RNA, 19 nt, synthetic construct
  source 1..19: mol_type = other RNA
ttaaagttgcctaagaaga

SEQ ID NO: 777 - RNA, 19 nt, synthetic construct
  source 1..19: mol_type = other RNA
taaagttgcctaagaagag

SEQ ID NO: 778 - RNA, 19 nt, synthetic construct
  source 1..19: mol_type = other RNA
aaagttgcctaagaagaga

SEQ ID NO: 779 - RNA, 19 nt, synthetic construct
  source 1..19: mol_type = other RNA
aagttgcctaagaagagaa

SEQ ID NO: 780 - RNA, 19 nt, synthetic construct
  source 1..19: mol_type = other RNA
agttgcctaagaagagaat

SEQ ID NO: 781 - RNA, 19 nt, synthetic construct
  source 1..19: mol_type = other RNA
gttgcctaagaagagaatg

SEQ ID NO: 782 - RNA, 19 nt, synthetic construct
  source 1..19: mol_type = other RNA
ttgcctaagaagagaatgt

SEQ ID NO: 783 - RNA, 19 nt, synthetic construct
  source 1..19: mol_type = other RNA
tgcctaagaagagaatgtc

SEQ ID NO: 784 - RNA, 19 nt, synthetic construct
  source 1..19: mol_type = other RNA
gcctaagaagagaatgtct

SEQ ID NO: 785 - RNA, 19 nt, synthetic construct
  source 1..19: mol_type = other RNA
cctaagaagagaatgtcta

SEQ ID NO: 786 - RNA, 19 nt, synthetic construct
  source 1..19: mol_type = other RNA
ctaagaagagaatgtctaa

SEQ ID NO: 787 - RNA, 19 nt, synthetic construct
  source 1..19: mol_type = other RNA
taagaagagaatgtctaaa

SEQ ID NO: 788 - RNA, 19 nt, synthetic construct
  source 1..19: mol_type = other RNA
aagaagagaatgtctaaat

SEQ ID NO: 789 - RNA, 19 nt, synthetic construct
  source 1..19: mol_type = other RNA
agaagagaatgtctaaata

SEQ ID NO: 790 - RNA, 19 nt, synthetic construct
  source 1..19: mol_type = other RNA
gaagagaatgtctaaataa

SEQ ID NO: 791 - RNA, 19 nt, synthetic construct
  source 1..19: mol_type = other RNA
aagagaatgtctaaataaa

SEQ ID NO: 792 - RNA, 19 nt, synthetic construct
  source 1..19: mol_type = other RNA
agagaatgtctaaataaat

SEQ ID NO: 793 - RNA, 19 nt, synthetic construct
  source 1..19: mol_type = other RNA
gagaatgtctaaataaatg

SEQ ID NO: 794 - RNA, 19 nt, synthetic construct
  source 1..19: mol_type = other RNA
agaatgtctaaataaatgg

SEQ ID NO: 795 - RNA, 19 nt, synthetic construct
  source 1..19: mol_type = other RNA
gaatgtctaaataaatgga

SEQ ID NO: 796 - RNA, 19 nt, synthetic construct
  source 1..19: mol_type = other RNA
aatgtctaaataaatggat

SEQ ID NO: 797 - RNA, 19 nt, synthetic construct
  source 1..19: mol_type = other RNA
atgtctaaataaatggatt

SEQ ID NO: 798 - RNA, 19 nt, synthetic construct
  source 1..19: mol_type = other RNA
tgtctaaataaatggattg

SEQ ID NO: 799 - RNA, 19 nt, synthetic construct
  source 1..19: mol_type = other RNA
gtctaaataaatggattgc

SEQ ID NO: 800 - RNA, 19 nt, synthetic construct
  source 1..19: mol_type = other RNA
tctaaataaatggattgct

SEQ ID NO: 801 - RNA, 19 nt, synthetic construct
  source 1..19: mol_type = other RNA
ctaaataaatggattgctt

SEQ ID NO: 802 - RNA, 19 nt, synthetic construct
  source 1..19: mol_type = other RNA
taaataaatggattgcttt

SEQ ID NO: 803 - RNA, 19 nt, synthetic construct
  source 1..19: mol_type = other RNA
aaataaatggattgctttt

SEQ ID NO: 804 - RNA, 19 nt, synthetic construct
  source 1..19: mol_type = other RNA
aataaatggattgcttttt

SEQ ID NO: 805 - RNA, 19 nt, synthetic construct
  source 1..19: mol_type = other RNA
ataaatggattgcttttta

SEQ ID NO: 806 - RNA, 19 nt, synthetic construct
  source 1..19: mol_type = other RNA
taaatggattgctttttag

SEQ ID NO: 807 - RNA, 19 nt, synthetic construct
  source 1..19: mol_type = other RNA
aaatggattgctttttagc

SEQ ID NO: 808 - RNA, 19 nt, synthetic construct
  source 1..19: mol_type = other RNA
aatggattgctttttagca

SEQ ID NO: 809 - RNA, 19 nt, synthetic construct
  source 1..19: mol_type = other RNA
atggattgctttttagcaa

SEQ ID NO: 810 - RNA, 19 nt, synthetic construct
  source 1..19: mol_type = other RNA
tggattgctttttagcaat

SEQ ID NO: 811 - RNA, 19 nt, synthetic construct
  source 1..19: mol_type = other RNA
ggattgctttttagcaata

SEQ ID NO: 812 - RNA, 19 nt, synthetic construct
  source 1..19: mol_type = other RNA
gattgctttttagcaatag

SEQ ID NO: 813 - RNA, 19 nt, synthetic construct
  source 1..19: mol_type = other RNA
attgctttttagcaataga

SEQ ID NO: 814 - RNA, 19 nt, synthetic construct
  source 1..19: mol_type = other RNA
ttgctttttagcaatagag

SEQ ID NO: 815 - RNA, 19 nt, synthetic construct
  source 1..19: mol_type = other RNA
tgctttttagcaatagagc

SEQ ID NO: 816 - RNA, 19 nt, synthetic construct
  source 1..19: mol_type = other RNA
gctttttagcaatagagct

SEQ ID NO: 817 - RNA, 19 nt, synthetic construct
  source 1..19: mol_type = other RNA
ctttttagcaatagagctg

SEQ ID NO: 818 - RNA, 19 nt, synthetic construct
  source 1..19: mol_type = other RNA
tttttagcaatagagctgc

SEQ ID NO: 819 - RNA, 19 nt, synthetic construct
  source 1..19: mol_type = other RNA
ttttagcaatagagctgct

SEQ ID NO: 820 - RNA, 19 nt, synthetic construct
  source 1..19: mol_type = other RNA
tttagcaatagagctgctt

SEQ ID NO: 821 - RNA, 19 nt, synthetic construct
  source 1..19: mol_type = other RNA
ttagcaatagagctgcttt

SEQ ID NO: 822 - RNA, 19 nt, synthetic construct
  source 1..19: mol_type = other RNA
tagcaatagagctgctttc

SEQ ID NO: 823 - RNA, 19 nt, synthetic construct
  source 1..19: mol_type = other RNA
agcaatagagctgctttct

SEQ ID NO: 824 - RNA, 19 nt, synthetic construct
  source 1..19: mol_type = other RNA
gcaatagagctgctttcta

SEQ ID NO: 825 - RNA, 19 nt, synthetic construct
  source 1..19: mol_type = other RNA
caatagagctgctttctag

SEQ ID NO: 826 - RNA, 19 nt, synthetic construct
  source 1..19: mol_type = other RNA
aatagagctgctttctagt

SEQ ID NO: 827 - RNA, 19 nt, synthetic construct
  source 1..19: mol_type = other RNA
atagagctgctttctagtg

SEQ ID NO: 828 - RNA, 19 nt, synthetic construct
  source 1..19: mol_type = other RNA
tagagctgctttctagtgg

SEQ ID NO: 829 - RNA, 19 nt, synthetic construct
  source 1..19: mol_type = other RNA
agagctgctttctagtggt

SEQ ID NO: 830 - RNA, 19 nt, synthetic construct
  source 1..19: mol_type = other RNA
gagctgctttctagtggta

SEQ ID NO: 831 - RNA, 19 nt, synthetic construct
  source 1..19: mol_type = other RNA
agctgctttctagtggtaa

SEQ ID NO: 832 - RNA, 19 nt, synthetic construct
  source 1..19: mol_type = other RNA
gctgctttctagtggtaaa

SEQ ID NO: 833 - RNA, 19 nt, synthetic construct
  source 1..19: mol_type = other RNA
ctgctttctagtggtaaag

SEQ ID NO: 834 - RNA, 19 nt, synthetic construct
  source 1..19: mol_type = other RNA
tgctttctagtggtaaagg

SEQ ID NO: 835 - RNA, 19 nt, synthetic construct
  source 1..19: mol_type = other RNA
gctttctagtggtaaagga

SEQ ID NO: 836 - RNA, 19 nt, synthetic construct
  source 1..19: mol_type = other RNA
ctttctagtggtaaaggaa

SEQ ID NO: 837 - RNA, 19 nt, synthetic construct
  source 1..19: mol_type = other RNA
tttctagtggtaaaggaag

SEQ ID NO: 838 - RNA, 19 nt, synthetic construct
  source 1..19: mol_type = other RNA
ttctagtggtaaaggaagg

SEQ ID NO: 839 - RNA, 19 nt, synthetic construct
  source 1..19: mol_type = other RNA
tctagtggtaaaggaaggg

SEQ ID NO: 840 - RNA, 19 nt, synthetic construct
  source 1..19: mol_type = other RNA
ctagtggtaaaggaagggg

SEQ ID NO: 841 - RNA, 19 nt, synthetic construct
  source 1..19: mol_type = other RNA
tagtggtaaaggaaggggt

SEQ ID NO: 842 - RNA, 19 nt, synthetic construct
  source 1..19: mol_type = other RNA
agtggtaaaggaaggggtc

SEQ ID NO: 843 - RNA, 19 nt, synthetic construct
  source 1..19: mol_type = other RNA
gtggtaaaggaaggggtca

SEQ ID NO: 844 - RNA, 19 nt, synthetic construct
  source 1..19: mol_type = other RNA
tggtaaaggaaggggtcac

SEQ ID NO: 845 - RNA, 19 nt, synthetic construct
  source 1..19: mol_type = other RNA
ggtaaaggaaggggtcacc

SEQ ID NO: 846 - RNA, 19 nt, synthetic construct
  source 1..19: mol_type = other RNA
gtaaaggaaggggtcacct

SEQ ID NO: 847 - RNA, 19 nt, synthetic construct
  source 1..19: mol_type = other RNA
taaaggaaggggtcacctg

SEQ ID NO: 848 - RNA, 19 nt, synthetic construct
  source 1..19: mol_type = other RNA
aaaggaaggggtcacctga

SEQ ID NO: 849 - RNA, 19 nt, synthetic construct
  source 1..19: mol_type = other RNA
aaggaaggggtcacctgaa

SEQ ID NO: 850 - RNA, 19 nt, synthetic construct
  source 1..19: mol_type = other RNA
aggaaggggtcacctgaaa

SEQ ID NO: 851 - RNA, 19 nt, synthetic construct
  source 1..19: mol_type = other RNA
ggaaggggtcacctgaaaa

SEQ ID NO: 852 - RNA, 19 nt, synthetic construct
  source 1..19: mol_type = other RNA
gaaggggtcacctgaaaaa

SEQ ID NO: 853 - RNA, 19 nt, synthetic construct
  source 1..19: mol_type = other RNA
aaggggtcacctgaaaaat

SEQ ID NO: 854 - RNA, 19 nt, synthetic construct
  source 1..19: mol_type = other RNA
aggggtcacctgaaaaata

SEQ ID NO: 855 - RNA, 19 nt, synthetic construct
  source 1..19: mol_type = other RNA
ggggtcacctgaaaaatag

SEQ ID NO: 856 - RNA, 19 nt, synthetic construct
  source 1..19: mol_type = other RNA
gggtcacctgaaaaatagg

SEQ ID NO: 857 - RNA, 19 nt, synthetic construct
  source 1..19: mol_type = other RNA
ggtcacctgaaaaatagga

SEQ ID NO: 858 - RNA, 19 nt, synthetic construct
  source 1..19: mol_type = other RNA
gtcacctgaaaaataggac

SEQ ID NO: 859 - RNA, 19 nt, synthetic construct
  source 1..19: mol_type = other RNA
tcacctgaaaaataggaca

SEQ ID NO: 860 - RNA, 19 nt, synthetic construct
  source 1..19: mol_type = other RNA
cacctgaaaaataggacat

SEQ ID NO: 861 - RNA, 19 nt, synthetic construct
  source 1..19: mol_type = other RNA
acctgaaaaataggacatt

SEQ ID NO: 862 - RNA, 19 nt, synthetic construct
  source 1..19: mol_type = other RNA
cctgaaaaataggacattt

SEQ ID NO: 863 - RNA, 19 nt, synthetic construct
  source 1..19: mol_type = other RNA
ctgaaaaataggacatttt

SEQ ID NO: 864 - RNA, 19 nt, synthetic construct
  source 1..19: mol_type = other RNA
tgaaaaataggacattttt

SEQ ID NO: 865 - RNA, 19 nt, synthetic construct
  source 1..19: mol_type = other RNA
gaaaaataggacattttta

SEQ ID NO: 866 - RNA, 19 nt, synthetic construct
  source 1..19: mol_type = other RNA
aaaaataggacatttttat

SEQ ID NO: 867 - RNA, 19 nt, synthetic construct
  source 1..19: mol_type = other RNA
aaaataggacatttttatt

SEQ ID NO: 868 - RNA, 19 nt, synthetic construct
  source 1..19: mol_type = other RNA
aaataggacatttttatta

SEQ ID NO: 869 - RNA, 19 nt, synthetic construct
  source 1..19: mol_type = other RNA
aataggacatttttattaa

SEQ ID NO: 870 - RNA, 19 nt, synthetic construct
  source 1..19: mol_type = other RNA
ataggacatttttattaaa

SEQ ID NO: 871 - RNA, 19 nt, synthetic construct
  source 1..19: mol_type = other RNA
taggacatttttattaaaa

SEQ ID NO: 872 - RNA, 19 nt, synthetic construct
  source 1..19: mol_type = other RNA
aggacatttttattaaaat

SEQ ID NO: 873 - RNA, 19 nt, synthetic construct
  source 1..19: mol_type = other RNA
ggacatttttattaaaata

SEQ ID NO: 874 - RNA, 19 nt, synthetic construct
  source 1..19: mol_type = other RNA
gacatttttattaaaataa

SEQ ID NO: 875 - RNA, 19 nt, synthetic construct
  source 1..19: mol_type = other RNA
acatttttattaaaataaa

SEQ ID NO: 876 - RNA, 19 nt, synthetic construct
  source 1..19: mol_type = other RNA
catttttattaaaataaag

SEQ ID NO: 877 - RNA, 19 nt, synthetic construct
  source 1..19: mol_type = other RNA
atttttattaaaataaagt

SEQ ID NO: 878 - RNA, 19 nt, synthetic construct
  source 1..19: mol_type = other RNA
tttttattaaaataaagtt

SEQ ID NO: 879 - RNA, 19 nt, synthetic construct
  source 1..19: mol_type = other RNA
ttttattaaaataaagttc

SEQ ID NO: 880 - RNA, 19 nt, synthetic construct
  source 1..19: mol_type = other RNA
tttattaaaataaagttct

SEQ ID NO: 881 - RNA, 19 nt, synthetic construct
  source 1..19: mol_type = other RNA
ttattaaaataaagttctc

SEQ ID NO: 882 - RNA, 19 nt, synthetic construct
  source 1..19: mol_type = other RNA
tattaaaataaagttctct

SEQ ID NO: 883 - RNA, 19 nt, synthetic construct
  source 1..19: mol_type = other RNA
attaaaataaagttctctt

SEQ ID NO: 884 - RNA, 19 nt, synthetic construct
  source 1..19: mol_type = other RNA
ttaaaataaagttctctta

SEQ ID NO: 885 - RNA, 19 nt, synthetic construct
  source 1..19: mol_type = other RNA
taaaataaagttctcttag

SEQ ID NO: 886 - RNA, 19 nt, synthetic construct
  source 1..19: mol_type = other RNA
aaaataaagttctcttagc

SEQ ID NO: 887 - RNA, 19 nt, synthetic construct
  source 1..19: mol_type = other RNA
aaataaagttctcttagcg

SEQ ID NO: 888 - RNA, 19 nt, synthetic construct
  source 1..19: mol_type = other RNA
aataaagttctcttagcgt

SEQ ID NO: 889 - RNA, 19 nt, synthetic construct
  source 1..19: mol_type = other RNA
ataaagttctcttagcgtt

SEQ ID NO: 890 - RNA, 19 nt, synthetic construct
  source 1..19: mol_type = other RNA
taaagttctcttagcgttt

SEQ ID NO: 891 - RNA, 19 nt, synthetic construct
  source 1..19: mol_type = other RNA
aaagttctcttagcgtttg

SEQ ID NO: 892 - RNA, 19 nt, synthetic construct
  source 1..19: mol_type = other RNA
aagttctcttagcgtttgt

SEQ ID NO: 893 - RNA, 19 nt, synthetic construct
  source 1..19: mol_type = other RNA
agttctcttagcgtttgtg

SEQ ID NO: 894 - RNA, 19 nt, synthetic construct
  source 1..19: mol_type = other RNA
gttctcttagcgtttgtgg

SEQ ID NO: 895 - RNA, 19 nt, synthetic construct
  source 1..19: mol_type = other RNA
ttctcttagcgtttgtgga

SEQ ID NO: 896 - RNA, 19 nt, synthetic construct
  source 1..19: mol_type = other RNA
tctcttagcgtttgtggaa

SEQ ID NO: 897 - RNA, 19 nt, synthetic construct
  source 1..19: mol_type = other RNA
ctcttagcgtttgtggaat

SEQ ID NO: 898 - RNA, 19 nt, synthetic construct
  source 1..19: mol_type = other RNA
tcttagcgtttgtggaatc

SEQ ID NO: 899 - RNA, 19 nt, synthetic construct
  source 1..19: mol_type = other RNA
cttagcgtttgtggaatct

SEQ ID NO: 900 - RNA, 19 nt, synthetic construct
  source 1..19: mol_type = other RNA
ttagcgtttgtggaatctg

SEQ ID NO: 901 - RNA, 19 nt, synthetic construct
  source 1..19: mol_type = other RNA
tagcgtttgtggaatctgc

SEQ ID NO: 902 - RNA, 19 nt, synthetic construct
  source 1..19: mol_type = other RNA
agcgtttgtggaatctgcc

SEQ ID NO: 903 - RNA, 19 nt, synthetic construct
  source 1..19: mol_type = other RNA
gcgtttgtggaatctgccg

SEQ ID NO: 904 - RNA, 19 nt, synthetic construct
  source 1..19: mol_type = other RNA
cgtttgtggaatctgccga

SEQ ID NO: 905 - RNA, 19 nt, synthetic construct
  source 1..19: mol_type = other RNA
gtttgtggaatctgccgag

SEQ ID NO: 906 - RNA, 19 nt, synthetic construct
  source 1..19: mol_type = other RNA
tttgtggaatctgccgagc

SEQ ID NO: 907 - RNA, 19 nt, synthetic construct
  source 1..19: mol_type = other RNA
ttgtggaatctgccgagcc

SEQ ID NO: 908 - RNA, 19 nt, synthetic construct
  source 1..19: mol_type = other RNA
tgtggaatctgccgagcca

SEQ ID NO: 909 - RNA, 19 nt, synthetic construct
  source 1..19: mol_type = other RNA
gtggaatctgccgagccat

SEQ ID NO: 910 - RNA, 19 nt, synthetic construct
  source 1..19: mol_type = other RNA
tggaatctgccgagccatt

SEQ ID NO: 911 - RNA, 19 nt, synthetic construct
  source 1..19: mol_type = other RNA
ggaatctgccgagccattt

SEQ ID NO: 912 - RNA, 19 nt, synthetic construct
  source 1..19: mol_type = other RNA
gaatctgccgagccatttt

SEQ ID NO: 913 - RNA, 19 nt, synthetic construct
  source 1..19: mol_type = other RNA
aatctgccgagccattttg

SEQ ID NO: 914 - RNA, 19 nt, synthetic construct
  source 1..19: mol_type = other RNA
atctgccgagccattttgt

SEQ ID NO: 915 - RNA, 19 nt, synthetic construct
  source 1..19: mol_type = other RNA
tctgccgagccattttgtg

SEQ ID NO: 916 - RNA, 19 nt, synthetic construct
  source 1..19: mol_type = other RNA
ctgccgagccattttgtgg

SEQ ID NO: 917 - RNA, 19 nt, synthetic construct
  source 1..19: mol_type = other RNA
tgccgagccattttgtgga

SEQ ID NO: 918 - RNA, 19 nt, synthetic construct
  source 1..19: mol_type = other RNA
gccgagccattttgtggaa

SEQ ID NO: 919 - RNA, 19 nt, synthetic construct
  source 1..19: mol_type = other RNA
ccgagccattttgtggaaa

SEQ ID NO: 920 - RNA, 19 nt, synthetic construct
  source 1..19: mol_type = other RNA
cgagccattttgtggaaat

SEQ ID NO: 921 - RNA, 19 nt, synthetic construct
  source 1..19: mol_type = other RNA
gagccattttgtggaaatt

SEQ ID NO: 922 - RNA, 19 nt, synthetic construct
  source 1..19: mol_type = other RNA
agccattttgtggaaattg

SEQ ID NO: 923 - RNA, 19 nt, synthetic construct
  source 1..19: mol_type = other RNA
gccattttgtggaaattgg

SEQ ID NO: 924 - RNA, 19 nt, synthetic construct
  source 1..19: mol_type = other RNA
ccattttgtggaaattggg

SEQ ID NO: 925 - RNA, 19 nt, synthetic construct
  source 1..19: mol_type = other RNA
cattttgtggaaattggga

SEQ ID NO: 926 - RNA, 19 nt, synthetic construct
  source 1..19: mol_type = other RNA
attttgtggaaattgggat

SEQ ID NO: 927 - RNA, 19 nt, synthetic construct
  source 1..19: mol_type = other RNA
ttttgtggaaattgggatc

SEQ ID NO: 928 - RNA, 19 nt, synthetic construct
  source 1..19: mol_type = other RNA
tttgtggaaattgggatcc

SEQ ID NO: 929 - RNA, 19 nt, synthetic construct
  source 1..19: mol_type = other RNA
ttgtggaaattgggatcca

SEQ ID NO: 930 - RNA, 19 nt, synthetic construct
  source 1..19: mol_type = other RNA
tgtggaaattgggatccat

SEQ ID NO: 931 - RNA, 19 nt, synthetic construct
  source 1..19: mol_type = other RNA
gtggaaattgggatccata

SEQ ID NO: 932 - RNA, 19 nt, synthetic construct
  source 1..19: mol_type = other RNA
tggaaattgggatccatat

SEQ ID NO: 933 - RNA, 19 nt, synthetic construct
  source 1..19: mol_type = other RNA
ggaaattgggatccatatc

SEQ ID NO: 934 - RNA, 19 nt, synthetic construct
  source 1..19: mol_type = other RNA
gaaattgggatccatatct

SEQ ID NO: 935 - RNA, 19 nt, synthetic construct
  source 1..19: mol_type = other RNA
aaattgggatccatatctg

SEQ ID NO: 936 - RNA, 19 nt, synthetic construct
  source 1..19: mol_type = other RNA
aattgggatccatatctgg

SEQ ID NO: 937 - RNA, 19 nt, synthetic construct
  source 1..19: mol_type = other RNA
attgggatccatatctgga

SEQ ID NO: 938 - RNA, 19 nt, synthetic construct
  source 1..19: mol_type = other RNA
ttgggatccatatctggag

SEQ ID NO: 939 - RNA, 19 nt, synthetic construct
  source 1..19: mol_type = other RNA
tgggatccatatctggaga

SEQ ID NO: 940 - RNA, 19 nt, synthetic construct
  source 1..19: mol_type = other RNA
gggatccatatctggagac

SEQ ID NO: 941 - RNA, 19 nt, synthetic construct
  source 1..19: mol_type = other RNA
ggatccatatctggagaca

SEQ ID NO: 942 - RNA, 19 nt, synthetic construct
  source 1..19: mol_type = other RNA
gatccatatctggagacac

SEQ ID NO: 943 - RNA, 19 nt, synthetic construct
  source 1..19: mol_type = other RNA
atccatatctggagacact

SEQ ID NO: 944 - RNA, 19 nt, synthetic construct
  source 1..19: mol_type = other RNA
tccatatctggagacactt

SEQ ID NO: 945 - RNA, 19 nt, synthetic construct
  source 1..19: mol_type = other RNA
ccatatctggagacacttc

SEQ ID NO: 946 - RNA, 19 nt, synthetic construct
  source 1..19: mol_type = other RNA
catatctggagacacttcc

SEQ ID NO: 947 - RNA, 19 nt, synthetic construct
  source 1..19: mol_type = other RNA
atatctggagacacttccc

SEQ ID NO: 948 - RNA, 19 nt, synthetic construct
  source 1..19: mol_type = other RNA
tatctggagacacttccca

SEQ ID NO: 949 - RNA, 19 nt, synthetic construct
  source 1..19: mol_type = other RNA
atctggagacacttcccaa

SEQ ID NO: 950 - RNA, 19 nt, synthetic construct
  source 1..19: mol_type = other RNA
tctggagacacttcccaag

SEQ ID NO: 951 - RNA, 19 nt, synthetic construct
  source 1..19: mol_type = other RNA
ctggagacacttcccaagg

SEQ ID NO: 952 - RNA, 19 nt, synthetic construct
  source 1..19: mol_type = other RNA
tggagacacttcccaaggc

SEQ ID NO: 953 - RNA, 19 nt, synthetic construct
  source 1..19: mol_type = other RNA
ggagacacttcccaaggcc

SEQ ID NO: 954 - RNA, 19 nt, synthetic construct
  source 1..19: mol_type = other RNA
gagacacttcccaaggcct

SEQ ID NO: 955 - RNA, 19 nt, synthetic construct
  source 1..19: mol_type = other RNA
agacacttcccaaggcctg

SEQ ID NO: 956 - RNA, 19 nt, synthetic construct
  source 1..19: mol_type = other RNA
gacacttcccaaggcctgc

SEQ ID NO: 957 - RNA, 19 nt, synthetic construct
  source 1..19: mol_type = other RNA
acacttcccaaggcctgcc

SEQ ID NO: 958 - RNA, 19 nt, synthetic construct
  source 1..19: mol_type = other RNA
cacttcccaaggcctgcct

SEQ ID NO: 959 - RNA, 19 nt, synthetic construct
  source 1..19: mol_type = other RNA
acttcccaaggcctgcctc

SEQ ID NO: 960 - RNA, 19 nt, synthetic construct
  source 1..19: mol_type = other RNA
cttcccaaggcctgcctca

SEQ ID NO: 961 - RNA, 19 nt, synthetic construct
  source 1..19: mol_type = other RNA
ttcccaaggcctgcctcac

SEQ ID NO: 962 - RNA, 19 nt, synthetic construct
  source 1..19: mol_type = other RNA
tcccaaggcctgcctcacc

SEQ ID NO: 963 - RNA, 19 nt, synthetic construct
  source 1..19: mol_type = other RNA
cccaaggcctgcctcacct

SEQ ID NO: 964 - RNA, 19 nt, synthetic construct
  source 1..19: mol_type = other RNA
ccaaggcctgcctcacctc

SEQ ID NO: 965 - RNA, 19 nt, synthetic construct
  source 1..19: mol_type = other RNA
caaggcctgcctcacctcc

SEQ ID NO: 966 - RNA, 19 nt, synthetic construct
  source 1..19: mol_type = other RNA
aaggcctgcctcacctcca

SEQ ID NO: 967 - RNA, 19 nt, synthetic construct
  source 1..19: mol_type = other RNA
aggcctgcctcacctccac

SEQ ID NO: 968 - RNA, 19 nt, synthetic construct
  source 1..19: mol_type = other RNA
ggcctgcctcacctccacc

SEQ ID NO: 969 - RNA, 19 nt, synthetic construct
  source 1..19: mol_type = other RNA
gcctgcctcacctccaccc

SEQ ID NO: 970 - RNA, 19 nt, synthetic construct
  source 1..19: mol_type = other RNA
cctgcctcacctccacccc

SEQ ID NO: 971 - RNA, 19 nt, synthetic construct
  source 1..19: mol_type = other RNA
ctgcctcacctccaccccc

SEQ ID NO: 972 - RNA, 19 nt, synthetic construct
  source 1..19: mol_type = other RNA
tgcctcacctccaccccct

SEQ ID NO: 973 - RNA, 19 nt, synthetic construct
  source 1..19: mol_type = other RNA
gcctcacctccaccccctg

SEQ ID NO: 974 - RNA, 19 nt, synthetic construct
  source 1..19: mol_type = other RNA
cctcacctccaccccctgc

SEQ ID NO: 975 - RNA, 19 nt, synthetic construct
  source 1..19: mol_type = other RNA
ctcacctccaccccctgcc

SEQ ID NO: 976 - RNA, 19 nt, synthetic construct
  source 1..19: mol_type = other RNA
tcacctccaccccctgccc

SEQ ID NO: 977 - RNA, 19 nt, synthetic construct
  source 1..19: mol_type = other RNA
cacctccaccccctgccca

SEQ ID NO: 978 - RNA, 19 nt, synthetic construct
  source 1..19: mol_type = other RNA
acctccaccccctgcccac

SEQ ID NO: 979 - RNA, 19 nt, synthetic construct
  source 1..19: mol_type = other RNA
cctccaccccctgcccacc

SEQ ID NO: 980 - RNA, 19 nt, synthetic construct
  source 1..19: mol_type = other RNA
ctccaccccctgcccacct

SEQ ID NO: 981 - RNA, 19 nt, synthetic construct
  source 1..19: mol_type = other RNA
tccaccccctgcccacctt

SEQ ID NO: 982 - RNA, 19 nt, synthetic construct
  source 1..19: mol_type = other RNA
ccaccccctgcccaccttg

SEQ ID NO: 983 - RNA, 19 nt, synthetic construct
  source 1..19: mol_type = other RNA
caccccctgcccaccttga

SEQ ID NO: 984 - RNA, 19 nt, synthetic construct
  source 1..19: mol_type = other RNA
accccctgcccaccttgat

SEQ ID NO: 985 - RNA, 19 nt, synthetic construct
  source 1..19: mol_type = other RNA
ccccctgcccaccttgatc

SEQ ID NO: 986 - RNA, 19 nt, synthetic construct
  source 1..19: mol_type = other RNA
cccctgcccaccttgatcc

SEQ ID NO: 987 - RNA, 19 nt, synthetic construct
  source 1..19: mol_type = other RNA
ccctgcccaccttgatcca

SEQ ID NO: 988 - RNA, 19 nt, synthetic construct
  source 1..19: mol_type = other RNA
cctgcccaccttgatccat

SEQ ID NO: 989 - RNA, 19 nt, synthetic construct
  source 1..19: mol_type = other RNA
ctgcccaccttgatccatg

SEQ ID NO: 990 - RNA, 19 nt, synthetic construct
  source 1..19: mol_type = other RNA
tgcccaccttgatccatgc

SEQ ID NO: 991 - RNA, 19 nt, synthetic construct
  source 1..19: mol_type = other RNA
gcccaccttgatccatgct

SEQ ID NO: 992 - RNA, 19 nt, synthetic construct
  source 1..19: mol_type = other RNA
cccaccttgatccatgctc

SEQ ID NO: 993 - RNA, 19 nt, synthetic construct
  source 1..19: mol_type = other RNA
ccaccttgatccatgctcc

SEQ ID NO: 994 - RNA, 19 nt, synthetic construct
  source 1..19: mol_type = other RNA
caccttgatccatgctcct

SEQ ID NO: 995 - RNA, 19 nt, synthetic construct
  source 1..19: mol_type = other RNA
accttgatccatgctcctt

SEQ ID NO: 996 - RNA, 19 nt, synthetic construct
  source 1..19: mol_type = other RNA
ccttgatccatgctccttt

SEQ ID NO: 997 - RNA, 19 nt, synthetic construct
  source 1..19: mol_type = other RNA
cttgatccatgctcctttg

SEQ ID NO: 998 - RNA, 19 nt, synthetic construct
  source 1..19: mol_type = other RNA
ttgatccatgctcctttga

SEQ ID NO: 999 - RNA, 19 nt, synthetic construct
  source 1..19: mol_type = other RNA
tgatccatgctcctttgac

SEQ ID NO: 1000 - RNA, 19 nt, synthetic construct
  source 1..19: mol_type = other RNA
gatccatgctcctttgacc

SEQ ID NO: 1001 - RNA, 19 nt, synthetic construct
  source 1..19: mol_type = other RNA
atccatgctcctttgacct

SEQ ID NO: 1002 - RNA, 19 nt, synthetic construct
  source 1..19: mol_type = other RNA
tccatgctcctttgacctc

SEQ ID NO: 1003 - RNA, 19 nt, synthetic construct
  source 1..19: mol_type = other RNA
ccatgctcctttgacctcc

SEQ ID NO: 1004 - RNA, 19 nt, synthetic construct
  source 1..19: mol_type = other RNA
catgctcctttgacctcct

SEQ ID NO: 1005 - RNA, 19 nt, synthetic construct
  source 1..19: mol_type = other RNA
atgctcctttgacctcctc

SEQ ID NO: 1006 - RNA, 19 nt, synthetic construct
  source 1..19: mol_type = other RNA
tgctcctttgacctcctcg

SEQ ID NO: 1007 - RNA, 19 nt, synthetic construct
  source 1..19: mol_type = other RNA
gctcctttgacctcctcgt

SEQ ID NO: 1008 - RNA, 19 nt, synthetic construct
  source 1..19: mol_type = other RNA
ctcctttgacctcctcgtg

SEQ ID NO: 1009 - RNA, 19 nt, synthetic construct
  source 1..19: mol_type = other RNA
tcctttgacctcctcgtgt

SEQ ID NO: 1010 - RNA, 19 nt, synthetic construct
  source 1..19: mol_type = other RNA
cctttgacctcctcgtgtg

SEQ ID NO: 1011 - RNA, 19 nt, synthetic construct
  source 1..19: mol_type = other RNA
ctttgacctcctcgtgtga

SEQ ID NO: 1012 - RNA, 19 nt, synthetic construct
  source 1..19: mol_type = other RNA
tttgacctcctcgtgtgag

SEQ ID NO: 1013 - RNA, 19 nt, synthetic construct
  source 1..19: mol_type = other RNA
ttgacctcctcgtgtgaga

SEQ ID NO: 1014 - RNA, 19 nt, synthetic construct
  source 1..19: mol_type = other RNA
tgacctcctcgtgtgagaa

SEQ ID NO: 1015 - RNA, 19 nt, synthetic construct
  source 1..19: mol_type = other RNA
gacctcctcgtgtgagaac

SEQ ID NO: 1016 - RNA, 19 nt, synthetic construct
  source 1..19: mol_type = other RNA
acctcctcgtgtgagaacc

SEQ ID NO: 1017 - RNA, 19 nt, synthetic construct
  source 1..19: mol_type = other RNA
cctcctcgtgtgagaaccc

SEQ ID NO: 1018 - RNA, 19 nt, synthetic construct
  source 1..19: mol_type = other RNA
ctcctcgtgtgagaacccc

SEQ ID NO: 1019 - RNA, 19 nt, synthetic construct
  source 1..19: mol_type = other RNA
tcctcgtgtgagaacccct

SEQ ID NO: 1020 - RNA, 19 nt, synthetic construct
  source 1..19: mol_type = other RNA
cctcgtgtgagaacccctt

SEQ ID NO: 1021 - RNA, 19 nt, synthetic construct
  source 1..19: mol_type = other RNA
ctcgtgtgagaaccccttt

SEQ ID NO: 1022 - RNA, 19 nt, synthetic construct
  source 1..19: mol_type = other RNA
tcgtgtgagaacccctttg

SEQ ID NO: 1023 - RNA, 19 nt, synthetic construct
  source 1..19: mol_type = other RNA
cgtgtgagaacccctttgc

SEQ ID NO: 1024 - RNA, 19 nt, synthetic construct
  source 1..19: mol_type = other RNA
gtgtgagaacccctttgcc

SEQ ID NO: 1025 - RNA, 19 nt, synthetic construct
  source 1..19: mol_type = other RNA
tgtgagaacccctttgcca

SEQ ID NO: 1026 - RNA, 19 nt, synthetic construct
  source 1..19: mol_type = other RNA
gtgagaacccctttgccag

SEQ ID NO: 1027 - RNA, 19 nt, synthetic construct
  source 1..19: mol_type = other RNA
tgagaacccctttgccaga

SEQ ID NO: 1028 - RNA, 19 nt, synthetic construct
  source 1..19: mol_type = other RNA
gagaacccctttgccagag

SEQ ID NO: 1029 - RNA, 19 nt, synthetic construct
  source 1..19: mol_type = other RNA
agaacccctttgccagagt

SEQ ID NO: 1030 - RNA, 19 nt, synthetic construct
  source 1..19: mol_type = other RNA
gaacccctttgccagagtg

SEQ ID NO: 1031 - RNA, 19 nt, synthetic construct
  source 1..19: mol_type = other RNA
aacccctttgccagagtga

SEQ ID NO: 1032 - RNA, 19 nt, synthetic construct
  source 1..19: mol_type = other RNA
acccctttgccagagtgag

SEQ ID NO: 1033 - RNA, 19 nt, synthetic construct
  source 1..19: mol_type = other RNA
cccctttgccagagtgaga

SEQ ID NO: 1034 - RNA, 19 nt, synthetic construct
  source 1..19: mol_type = other RNA
ccctttgccagagtgagac

SEQ ID NO: 1035 - RNA, 19 nt, synthetic construct
  source 1..19: mol_type = other RNA
cctttgccagagtgagacg

SEQ ID NO: 1036 - RNA, 19 nt, synthetic construct
  source 1..19: mol_type = other RNA
ctttgccagagtgagacgt

SEQ ID NO: 1037 - RNA, 19 nt, synthetic construct
  source 1..19: mol_type = other RNA
tttgccagagtgagacgtg

SEQ ID NO: 1038 - RNA, 19 nt, synthetic construct
  source 1..19: mol_type = other RNA
ttgccagagtgagacgtgt

SEQ ID NO: 1039 - RNA, 19 nt, synthetic construct
  source 1..19: mol_type = other RNA
tgccagagtgagacgtgtg

SEQ ID NO: 1040 - RNA, 19 nt, synthetic construct
  source 1..19: mol_type = other RNA
gccagagtgagacgtgtgc

SEQ ID NO: 1041 - RNA, 19 nt, synthetic construct
  source 1..19: mol_type = other RNA
ccagagtgagacgtgtgca

SEQ ID NO: 1042 - RNA, 19 nt, synthetic construct
  source 1..19: mol_type = other RNA
cagagtgagacgtgtgcag

SEQ ID NO: 1043 - RNA, 19 nt, synthetic construct
  source 1..19: mol_type = other RNA
agagtgagacgtgtgcaga

SEQ ID NO: 1044 - RNA, 19 nt, synthetic construct
  source 1..19: mol_type = other RNA
gagtgagacgtgtgcagaa

SEQ ID NO: 1045 - RNA, 19 nt, synthetic construct
  source 1..19: mol_type = other RNA
agtgagacgtgtgcagaat

SEQ ID NO: 1046 - RNA, 19 nt, synthetic construct
  source 1..19: mol_type = other RNA
gtgagacgtgtgcagaatg

SEQ ID NO: 1047 - RNA, 19 nt, synthetic construct
  source 1..19: mol_type = other RNA
tgagacgtgtgcagaatga

SEQ ID NO: 1048 - RNA, 19 nt, synthetic construct
  source 1..19: mol_type = other RNA
gagacgtgtgcagaatgaa

SEQ ID NO: 1049 - RNA, 19 nt, synthetic construct
  source 1..19: mol_type = other RNA
agacgtgtgcagaatgaac

SEQ ID NO: 1050 - RNA, 19 nt, synthetic construct
  source 1..19: mol_type = other RNA
gacgtgtgcagaatgaact

SEQ ID NO: 1051 - RNA, 19 nt, synthetic construct
  source 1..19: mol_type = other RNA
acgtgtgcagaatgaacta

SEQ ID NO: 1052 - RNA, 19 nt, synthetic construct
  source 1..19: mol_type = other RNA
cgtgtgcagaatgaactaa

SEQ ID NO: 1053 - RNA, 19 nt, synthetic construct
  source 1..19: mol_type = other RNA
gtgtgcagaatgaactaag

SEQ ID NO: 1054 - RNA, 19 nt, synthetic construct
  source 1..19: mol_type = other RNA
tgtgcagaatgaactaagc

SEQ ID NO: 1055 - RNA, 19 nt, synthetic construct
  source 1..19: mol_type = other RNA
gtgcagaatgaactaagcc

SEQ ID NO: 1056 - RNA, 19 nt, synthetic construct
  source 1..19: mol_type = other RNA
tgcagaatgaactaagccc

SEQ ID NO: 1057 - RNA, 19 nt, synthetic construct
  source 1..19: mol_type = other RNA
gcagaatgaactaagcccc

SEQ ID NO: 1058 - RNA, 19 nt, synthetic construct
  source 1..19: mol_type = other RNA
cagaatgaactaagcccca

SEQ ID NO: 1059 - RNA, 19 nt, synthetic construct
  source 1..19: mol_type = other RNA
agaatgaactaagccccag

SEQ ID NO: 1060 - RNA, 19 nt, synthetic construct
  source 1..19: mol_type = other RNA
gaatgaactaagccccaga

SEQ ID NO: 1061 - RNA, 19 nt, synthetic construct
  source 1..19: mol_type = other RNA
aatgaactaagccccagag

SEQ ID NO: 1062 - RNA, 19 nt, synthetic construct
  source 1..19: mol_type = other RNA
atgaactaagccccagagg

SEQ ID NO: 1063 - RNA, 19 nt, synthetic construct
  source 1..19: mol_type = other RNA
tgaactaagccccagaggg

SEQ ID NO: 1064 - RNA, 19 nt, synthetic construct
  source 1..19: mol_type = other RNA
gaactaagccccagagggt

SEQ ID NO: 1065 - RNA, 19 nt, synthetic construct
  source 1..19: mol_type = other RNA
aactaagccccagagggtt

SEQ ID NO: 1066 - RNA, 19 nt, synthetic construct
  source 1..19: mol_type = other RNA
actaagccccagagggttt

SEQ ID NO: 1067 - RNA, 19 nt, synthetic construct
  source 1..19: mol_type = other RNA
ctaagccccagagggtttt

SEQ ID NO: 1068 - RNA, 19 nt, synthetic construct
  source 1..19: mol_type = other RNA
taagccccagagggtttta

SEQ ID NO: 1069 - RNA, 19 nt, synthetic construct
  source 1..19: mol_type = other RNA
aagccccagagggttttaa

SEQ ID NO: 1070 - RNA, 19 nt, synthetic construct
  source 1..19: mol_type = other RNA
agccccagagggttttaat

SEQ ID NO: 1071 - RNA, 19 nt, synthetic construct
  source 1..19: mol_type = other RNA
gccccagagggttttaatg

SEQ ID NO: 1072 - RNA, 19 nt, synthetic construct
  source 1..19: mol_type = other RNA
ccccagagggttttaatgg

SEQ ID NO: 1073 - RNA, 19 nt, synthetic construct
  source 1..19: mol_type = other RNA
cccagagggttttaatggc

SEQ ID NO: 1074 - RNA, 19 nt, synthetic construct
  source 1..19: mol_type = other RNA
ccagagggttttaatggct

SEQ ID NO: 1075 - RNA, 19 nt, synthetic construct
  source 1..19: mol_type = other RNA
cagagggttttaatggctt

SEQ ID NO: 1076 - RNA, 19 nt, synthetic construct
  source 1..19: mol_type = other RNA
agagggttttaatggcttg

SEQ ID NO: 1077 - RNA, 19 nt, synthetic construct
  source 1..19: mol_type = other RNA
gagggttttaatggcttgc

SEQ ID NO: 1078 - RNA, 19 nt, synthetic construct
  source 1..19: mol_type = other RNA
agggttttaatggcttgcc

SEQ ID NO: 1079 - RNA, 19 nt, synthetic construct
  source 1..19: mol_type = other RNA
gggttttaatggcttgcct

SEQ ID NO: 1080 - RNA, 19 nt, synthetic construct
  source 1..19: mol_type = other RNA
ggttttaatggcttgcctg

SEQ ID NO: 1081 - RNA, 19 nt, synthetic construct
  source 1..19: mol_type = other RNA
gttttaatggcttgcctgc

SEQ ID NO: 1082 - RNA, 19 nt, synthetic construct
  source 1..19: mol_type = other RNA
ttttaatggcttgcctgct

SEQ ID NO: 1083 - RNA, 19 nt, synthetic construct
  source 1..19: mol_type = other RNA
tttaatggcttgcctgctg

SEQ ID NO: 1084 - RNA, 19 nt, synthetic construct
  source 1..19: mol_type = other RNA
ttaatggcttgcctgctgt

SEQ ID NO: 1085 - RNA, 19 nt, synthetic construct
  source 1..19: mol_type = other RNA
taatggcttgcctgctgtt

SEQ ID NO: 1086 - RNA, 19 nt, synthetic construct
  source 1..19: mol_type = other RNA
aatggcttgcctgctgttt

SEQ ID NO: 1087 - RNA, 19 nt, synthetic construct
  source 1..19: mol_type = other RNA
atggcttgcctgctgtttc

SEQ ID NO: 1088 - RNA, 19 nt, synthetic construct
  source 1..19: mol_type = other RNA
tggcttgcctgctgtttcc

SEQ ID NO: 1089 - RNA, 19 nt, synthetic construct
  source 1..19: mol_type = other RNA
ggcttgcctgctgtttccc

SEQ ID NO: 1090 - RNA, 19 nt, synthetic construct
  source 1..19: mol_type = other RNA
gcttgcctgctgtttccca

SEQ ID NO: 1091 - RNA, 19 nt, synthetic construct
  source 1..19: mol_type = other RNA
cttgcctgctgtttcccac

SEQ ID NO: 1092 - RNA, 19 nt, synthetic construct
  source 1..19: mol_type = other RNA
ttgcctgctgtttcccaca

SEQ ID NO: 1093 - RNA, 19 nt, synthetic construct
  source 1..19: mol_type = other RNA
tgcctgctgtttcccacat

SEQ ID NO: 1094 - RNA, 19 nt, synthetic construct
  source 1..19: mol_type = other RNA
gcctgctgtttcccacata

SEQ ID NO: 1095 - RNA, 19 nt, synthetic construct
  source 1..19: mol_type = other RNA
cctgctgtttcccacataa

SEQ ID NO: 1096 - RNA, 19 nt, synthetic construct
  source 1..19: mol_type = other RNA
ctgctgtttcccacataaa

SEQ ID NO: 1097 - RNA, 19 nt, synthetic construct
  source 1..19: mol_type = other RNA
tgctgtttcccacataaac

SEQ ID NO: 1098 - RNA, 19 nt, synthetic construct
  source 1..19: mol_type = other RNA
gctgtttcccacataaact

SEQ ID NO: 1099 - RNA, 19 nt, synthetic construct
  source 1..19: mol_type = other RNA
ctgtttcccacataaacta

SEQ ID NO: 1100 - RNA, 19 nt, synthetic construct
  source 1..19: mol_type = other RNA
tgtttcccacataaactac

SEQ ID NO: 1101 - RNA, 19 nt, synthetic construct
  source 1..19: mol_type = other RNA
gtttcccacataaactacc

SEQ ID NO: 1102 - RNA, 19 nt, synthetic construct
  source 1..19: mol_type = other RNA
tttcccacataaactacct

SEQ ID NO: 1103 - RNA, 19 nt, synthetic construct
  source 1..19: mol_type = other RNA
ttcccacataaactacctc

SEQ ID NO: 1104 - RNA, 19 nt, synthetic construct
  source 1..19: mol_type = other RNA
tcccacataaactacctca

SEQ ID NO: 1105 - RNA, 19 nt, synthetic construct
  source 1..19: mol_type = other RNA
cccacataaactacctcag

SEQ ID NO: 1106 - RNA, 19 nt, synthetic construct
  source 1..19: mol_type = other RNA
ccacataaactacctcagg

SEQ ID NO: 1107 - RNA, 19 nt, synthetic construct
  source 1..19: mol_type = other RNA
cacataaactacctcagga

SEQ ID NO: 1108 - RNA, 19 nt, synthetic construct
  source 1..19: mol_type = other RNA
acataaactacctcaggag

SEQ ID NO: 1109 - RNA, 19 nt, synthetic construct
  source 1..19: mol_type = other RNA
cataaactacctcaggagt

SEQ ID NO: 1110 - RNA, 19 nt, synthetic construct
  source 1..19: mol_type = other RNA
ataaactacctcaggagtc

SEQ ID NO: 1111 - RNA, 19 nt, synthetic construct
  source 1..19: mol_type = other RNA
taaactacctcaggagtca

SEQ ID NO: 1112 - RNA, 19 nt, synthetic construct
  source 1..19: mol_type = other RNA
aaactacctcaggagtcac

SEQ ID NO: 1113 - RNA, 19 nt, synthetic construct
  source 1..19: mol_type = other RNA
aactacctcaggagtcact

SEQ ID NO: 1114 - RNA, 19 nt, synthetic construct
  source 1..19: mol_type = other RNA
actacctcaggagtcactg

SEQ ID NO: 1115 - RNA, 19 nt, synthetic construct
  source 1..19: mol_type = other RNA
ctacctcaggagtcactgt

SEQ ID NO: 1116 - RNA, 19 nt, synthetic construct
  source 1..19: mol_type = other RNA
tacctcaggagtcactgta

SEQ ID NO: 1117 - RNA, 19 nt, synthetic construct
  source 1..19: mol_type = other RNA
acctcaggagtcactgtaa

SEQ ID NO: 1118 - RNA, 19 nt, synthetic construct
  source 1..19: mol_type = other RNA
cctcaggagtcactgtaaa

SEQ ID NO: 1119 - RNA, 19 nt, synthetic construct
  source 1..19: mol_type = other RNA
ctcaggagtcactgtaaaa

SEQ ID NO: 1120 - RNA, 19 nt, synthetic construct
  source 1..19: mol_type = other RNA
tcaggagtcactgtaaaat

SEQ ID NO: 1121 - RNA, 19 nt, synthetic construct
  source 1..19: mol_type = other RNA
caggagtcactgtaaaata

SEQ ID NO: 1122 - RNA, 19 nt, synthetic construct
  source 1..19: mol_type = other RNA
aggagtcactgtaaaataa

SEQ ID NO: 1123 - RNA, 19 nt, synthetic construct
  source 1..19: mol_type = other RNA
ggagtcactgtaaaataaa

SEQ ID NO: 1124 - RNA, 19 nt, synthetic construct
  source 1..19: mol_type = other RNA
gagtcactgtaaaataaac

SEQ ID NO: 1125 - RNA, 19 nt, synthetic construct
  source 1..19: mol_type = other RNA
agtcactgtaaaataaact

SEQ ID NO: 1126 - RNA, 19 nt, synthetic construct
  source 1..19: mol_type = other RNA
gtcactgtaaaataaactg

SEQ ID NO: 1127 - RNA, 19 nt, synthetic construct
  source 1..19: mol_type = other RNA
tcactgtaaaataaactgg

SEQ ID NO: 1128 - RNA, 19 nt, synthetic construct
  source 1..19: mol_type = other RNA
cactgtaaaataaactggc

SEQ ID NO: 1129 - RNA, 19 nt, synthetic construct
  source 1..19: mol_type = other RNA
actgtaaaataaactggcc

SEQ ID NO: 1130 - RNA, 19 nt, synthetic construct
  source 1..19: mol_type = other RNA
ctgtaaaataaactggcct

SEQ ID NO: 1131 - RNA, 19 nt, synthetic construct
  source 1..19: mol_type = other RNA
tgtaaaataaactggcctt

SEQ ID NO: 1132 - RNA, 19 nt, synthetic construct
  source 1..19: mol_type = other RNA
gtaaaataaactggccttg

SEQ ID NO: 1133 - RNA, 19 nt, synthetic construct
  source 1..19: mol_type = other RNA
taaaataaactggccttgt

SEQ ID NO: 1134 - RNA, 19 nt, synthetic construct
  source 1..19: mol_type = other RNA
aaaataaactggccttgtt

SEQ ID NO: 1135 - RNA, 19 nt, synthetic construct
  source 1..19: mol_type = other RNA
aaataaactggccttgttg

SEQ ID NO: 1136 - RNA, 19 nt, synthetic construct
  source 1..19: mol_type = other RNA
aataaactggccttgttgt

SEQ ID NO: 1137 - RNA, 19 nt, synthetic construct
  source 1..19: mol_type = other RNA
ataaactggccttgttgtc

SEQ ID NO: 1138 - RNA, 19 nt, synthetic construct
  source 1..19: mol_type = other RNA
taaactggccttgttgtct

SEQ ID NO: 1139 - RNA, 19 nt, synthetic construct
  source 1..19: mol_type = other RNA
aaactggccttgttgtctt

SEQ ID NO: 1140 - RNA, 19 nt, synthetic construct
  source 1..19: mol_type = other RNA
aactggccttgttgtctta

SEQ ID NO: 1141 - RNA, 19 nt, synthetic construct
  source 1..19: mol_type = other RNA
aggctacccctatctgcgc

SEQ ID NO: 1142 - RNA, 19 nt, synthetic construct
  source 1..19: mol_type = other RNA
caggctacccctatctgcg

SEQ ID NO: 1143 - RNA, 19 nt, synthetic construct
  source 1..19: mol_type = other RNA
ccaggctacccctatctgc

SEQ ID NO: 1144 - RNA, 19 nt, synthetic construct
  source 1..19: mol_type = other RNA
tccaggctacccctatctg

SEQ ID NO: 1145 - RNA, 19 nt, synthetic construct
  source 1..19: mol_type = other RNA
ctccaggctacccctatct

SEQ ID NO: 1146 - RNA, 19 nt, synthetic construct
  source 1..19: mol_type = other RNA
cctccaggctacccctatc

SEQ ID NO: 1147 - RNA, 19 nt, synthetic construct
  source 1..19: mol_type = other RNA
gcctccaggctacccctat

SEQ ID NO: 1148 - RNA, 19 nt, synthetic construct
  source 1..19: mol_type = other RNA
ggcctccaggctaccccta

SEQ ID NO: 1149 - RNA, 19 nt, synthetic construct
  source 1..19: mol_type = other RNA
aggcctccaggctacccct

SEQ ID NO: 1150 - RNA, 19 nt, synthetic construct
  source 1..19: mol_type = other RNA
caggcctccaggctacccc

SEQ ID NO: 1151 - RNA, 19 nt, synthetic construct
  source 1..19: mol_type = other RNA
gcaggcctccaggctaccc

SEQ ID NO: 1152 - RNA, 19 nt, synthetic construct
  source 1..19: mol_type = other RNA
tgcaggcctccaggctacc

SEQ ID NO: 1153 - RNA, 19 nt, synthetic construct
  source 1..19: mol_type = other RNA
ctgcaggcctccaggctac

SEQ ID NO: 1154 - RNA, 19 nt, synthetic construct
  source 1..19: mol_type = other RNA
actgcaggcctccaggcta

SEQ ID NO: 1155 - RNA, 19 nt, synthetic construct
  source 1..19: mol_type = other RNA
gactgcaggcctccaggct

SEQ ID NO: 1156 - RNA, 19 nt, synthetic construct
  source 1..19: mol_type = other RNA
ggactgcaggcctccaggc

SEQ ID NO: 1157 - RNA, 19 nt, synthetic construct
  source 1..19: mol_type = other RNA
cggactgcaggcctccagg

SEQ ID NO: 1158 - RNA, 19 nt, synthetic construct
  source 1..19: mol_type = other RNA
gcggactgcaggcctccag

SEQ ID NO: 1159 - RNA, 19 nt, synthetic construct
  source 1..19: mol_type = other RNA
cgcggactgcaggcctcca

SEQ ID NO: 1160 - RNA, 19 nt, synthetic construct
  source 1..19: mol_type = other RNA
gcgcggactgcaggcctcc

SEQ ID NO: 1161 - RNA, 19 nt, synthetic construct
  source 1..19: mol_type = other RNA
cgcgcggactgcaggcctc

SEQ ID NO: 1162 - RNA, 19 nt, synthetic construct
  source 1..19: mol_type = other RNA
ccgcgcggactgcaggcct

SEQ ID NO: 1163 - RNA, 19 nt, synthetic construct
  source 1..19: mol_type = other RNA
gccgcgcggactgcaggcc

SEQ ID NO: 1164 - RNA, 19 nt, synthetic construct
  source 1..19: mol_type = other RNA
ggccgcgcggactgcaggc

SEQ ID NO: 1165 - RNA, 19 nt, synthetic construct
  source 1..19: mol_type = other RNA
cggccgcgcggactgcagg

SEQ ID NO: 1166 - RNA, 19 nt, synthetic construct
  source 1..19: mol_type = other RNA
gcggccgcgcggactgcag

SEQ ID NO: 1167 - RNA, 19 nt, synthetic construct
  source 1..19: mol_type = other RNA
cgcggccgcgcggactgca

SEQ ID NO: 1168 - RNA, 19 nt, synthetic construct
  source 1..19: mol_type = other RNA
ccgcggccgcgcggactgc

SEQ ID NO: 1169 - RNA, 19 nt, synthetic construct
  source 1..19: mol_type = other RNA
cccgcggccgcgcggactg

SEQ ID NO: 1170 - RNA, 19 nt, synthetic construct
  source 1..19: mol_type = other RNA
ccccgcggccgcgcggact

SEQ ID NO: 1171 - RNA, 19 nt, synthetic construct
  source 1..19: mol_type = other RNA
tccccgcggccgcgcggac

SEQ ID NO: 1172 - RNA, 19 nt, synthetic construct
  source 1..19: mol_type = other RNA
ctccccgcggccgcgcgga

SEQ ID NO: 1173 - RNA, 19 nt, synthetic construct
  source 1..19: mol_type = other RNA
cctccccgcggccgcgcgg

SEQ ID NO: 1174 - RNA, 19 nt, synthetic construct
  source 1..19: mol_type = other RNA
ccctccccgcggccgcgcg

SEQ ID NO: 1175 - RNA, 19 nt, synthetic construct
  source 1..19: mol_type = other RNA
tccctccccgcggccgcgc

SEQ ID NO: 1176 - RNA, 19 nt, synthetic construct
  source 1..19: mol_type = other RNA
gtccctccccgcggccgcg

SEQ ID NO: 1177 - RNA, 19 nt, synthetic construct
  source 1..19: mol_type = other RNA
cgtccctccccgcggccgc

SEQ ID NO: 1178 - RNA, 19 nt, synthetic construct
  source 1..19: mol_type = other RNA
tcgtccctccccgcggccg

SEQ ID NO: 1179 - RNA, 19 nt, synthetic construct
  source 1..19: mol_type = other RNA
ctcgtccctccccgcggcc

SEQ ID NO: 1180 - RNA, 19 nt, synthetic construct
  source 1..19: mol_type = other RNA
tctcgtccctccccgcggc

SEQ ID NO: 1181 - RNA, 19 nt, synthetic construct
  source 1..19: mol_type = other RNA
ctctcgtccctccccgcgg

SEQ ID NO: 1182 - RNA, 19 nt, synthetic construct
  source 1..19: mol_type = other RNA
cctctcgtccctccccgcg

SEQ ID NO: 1183 - RNA, 19 nt, synthetic construct
  source 1..19: mol_type = other RNA
ccctctcgtccctccccgc

SEQ ID NO: 1184 - RNA, 19 nt, synthetic construct
  source 1..19: mol_type = other RNA
gccctctcgtccctccccg

SEQ ID NO: 1185 - RNA, 19 nt, synthetic construct
  source 1..19: mol_type = other RNA
ggccctctcgtccctcccc

SEQ ID NO: 1186 - RNA, 19 nt, synthetic construct
  source 1..19: mol_type = other RNA
aggccctctcgtccctccc

SEQ ID NO: 1187 - RNA, 19 nt, synthetic construct
  source 1..19: mol_type = other RNA
caggccctctcgtccctcc

SEQ ID NO: 1188 - RNA, 19 nt, synthetic construct
  source 1..19: mol_type = other RNA
tcaggccctctcgtccctc

SEQ ID NO: 1189 - RNA, 19 nt, synthetic construct
  source 1..19: mol_type = other RNA
gtcaggccctctcgtccct

SEQ ID NO: 1190 - RNA, 19 nt, synthetic construct
  source 1..19: mol_type = other RNA
cgtcaggccctctcgtccc

SEQ ID NO: 1191 - RNA, 19 nt, synthetic construct
  source 1..19: mol_type = other RNA
acgtcaggccctctcgtcc

SEQ ID NO: 1192 - RNA, 19 nt, synthetic construct
  source 1..19: mol_type = other RNA
tacgtcaggccctctcgtc

SEQ ID NO: 1193 - RNA, 19 nt, synthetic construct
  source 1..19: mol_type = other RNA
gtacgtcaggccctctcgt

SEQ ID NO: 1194 - RNA, 19 nt, synthetic construct
  source 1..19: mol_type = other RNA
tgtacgtcaggccctctcg

SEQ ID NO: 1195 - RNA, 19 nt, synthetic construct
  source 1..19: mol_type = other RNA
ctgtacgtcaggccctctc

SEQ ID NO: 1196 - RNA, 19 nt, synthetic construct
  source 1..19: mol_type = other RNA
tctgtacgtcaggccctct

SEQ ID NO: 1197 - RNA, 19 nt, synthetic construct
  source 1..19: mol_type = other RNA
atctgtacgtcaggccctc

SEQ ID NO: 1198 - RNA, 19 nt, synthetic construct
  source 1..19: mol_type = other RNA
aatctgtacgtcaggccct

SEQ ID NO: 1199 - RNA, 19 nt, synthetic construct
  source 1..19: mol_type = other RNA
taatctgtacgtcaggccc

SEQ ID NO: 1200 - RNA, 19 nt, synthetic construct
  source 1..19: mol_type = other RNA
ataatctgtacgtcaggcc

SEQ ID NO: 1201 - RNA, 19 nt, synthetic construct
  source 1..19: mol_type = other RNA
tataatctgtacgtcaggc

SEQ ID NO: 1202 - RNA, 19 nt, synthetic construct
  source 1..19: mol_type = other RNA
ttataatctgtacgtcagg

SEQ ID NO: 1203 - RNA, 19 nt, synthetic construct
  source 1..19: mol_type = other RNA
cttataatctgtacgtcag

SEQ ID NO: 1204 - RNA, 19 nt, synthetic construct
  source 1..19: mol_type = other RNA
gcttataatctgtacgtca

SEQ ID NO: 1205 - RNA, 19 nt, synthetic construct
  source 1..19: mol_type = other RNA
cgcttataatctgtacgtc

SEQ ID NO: 1206 - RNA, 19 nt, synthetic construct
  source 1..19: mol_type = other RNA
gcgcttataatctgtacgt

SEQ ID NO: 1207 - RNA, 19 nt, synthetic construct
  source 1..19: mol_type = other RNA
ggcgcttataatctgtacg

SEQ ID NO: 1208 - RNA, 19 nt, synthetic construct
  source 1..19: mol_type = other RNA
tggcgcttataatctgtac

SEQ ID NO: 1209 - RNA, 19 nt, synthetic construct
  source 1..19: mol_type = other RNA
atggcgcttataatctgta

SEQ ID NO: 1210 - RNA, 19 nt, synthetic construct
  source 1..19: mol_type = other RNA
catggcgcttataatctgt

SEQ ID NO: 1211 - RNA, 19 nt, synthetic construct
  source 1..19: mol_type = other RNA
ccatggcgcttataatctg

SEQ ID NO: 1212 - RNA, 19 nt, synthetic construct
  source 1..19: mol_type = other RNA
gccatggcgcttataatct

SEQ ID NO: 1213 - RNA, 19 nt, synthetic construct
  source 1..19: mol_type = other RNA
agccatggcgcttataatc

SEQ ID NO: 1214 - RNA, 19 nt, synthetic construct
  source 1..19: mol_type = other RNA
tagccatggcgcttataat

SEQ ID NO: 1215 - RNA, 19 nt, synthetic construct
  source 1..19: mol_type = other RNA
atagccatggcgcttataa

SEQ ID NO: 1216 - RNA, 19 nt, synthetic construct
  source 1..19: mol_type = other RNA
catagccatggcgcttata

SEQ ID NO: 1217 - RNA, 19 nt, synthetic construct
  source 1..19: mol_type = other RNA
ccatagccatggcgcttat

SEQ ID NO: 1218 - RNA, 19 nt, synthetic construct
  source 1..19: mol_type = other RNA
gccatagccatggcgctta

SEQ ID NO: 1219 - RNA, 19 nt, synthetic construct
  source 1..19: mol_type = other RNA
agccatagccatggcgctt

SEQ ID NO: 1220 - RNA, 19 nt, synthetic construct
  source 1..19: mol_type = other RNA
tagccatagccatggcgct

SEQ ID NO: 1221 - RNA, 19 nt, synthetic construct
  source 1..19: mol_type = other RNA
ctagccatagccatggcgc

SEQ ID NO: 1222 - RNA, 19 nt, synthetic construct
  source 1..19: mol_type = other RNA
actagccatagccatggcg

SEQ ID NO: 1223 - RNA, 19 nt, synthetic construct
  source 1..19: mol_type = other RNA
cactagccatagccatggc

SEQ ID NO: 1224 - RNA, 19 nt, synthetic construct
  source 1..19: mol_type = other RNA
acactagccatagccatgg

SEQ ID NO: 1225 - RNA, 19 nt, synthetic construct
  source 1..19: mol_type = other RNA
aacactagccatagccatg

SEQ ID NO: 1226 - RNA, 19 nt, synthetic construct
  source 1..19: mol_type = other RNA
taacactagccatagccat

SEQ ID NO: 1227 - RNA, 19 nt, synthetic construct
  source 1..19: mol_type = other RNA
ttaacactagccatagcca

SEQ ID NO: 1228 - RNA, 19 nt, synthetic construct
  source 1..19: mol_type = other RNA
tttaacactagccatagcc

SEQ ID NO: 1229 - RNA, 19 nt, synthetic construct
  source 1..19: mol_type = other RNA
atttaacactagccatagc

SEQ ID NO: 1230 - RNA, 19 nt, synthetic construct
  source 1..19: mol_type = other RNA
aatttaacactagccatag

SEQ ID NO: 1231 - RNA, 19 nt, synthetic construct
  source 1..19: mol_type = other RNA
caatttaacactagccata

SEQ ID NO: 1232 - RNA, 19 nt, synthetic construct
  source 1..19: mol_type = other RNA
gcaatttaacactagccat

SEQ ID NO: 1233 - RNA, 19 nt, synthetic construct
  source 1..19: mol_type = other RNA
agcaatttaacactagcca

SEQ ID NO: 1234 - RNA, 19 nt, synthetic construct
  source 1..19: mol_type = other RNA
aagcaatttaacactagcc

SEQ ID NO: 1235 - RNA, 19 nt, synthetic construct
  source 1..19: mol_type = other RNA
caagcaatttaacactagc

SEQ ID NO: 1236 - RNA, 19 nt, synthetic construct
  source 1..19: mol_type = other RNA
gcaagcaatttaacactag

SEQ ID NO: 1237 - RNA, 19 nt, synthetic construct
  source 1..19: mol_type = other RNA
ggcaagcaatttaacacta

SEQ ID NO: 1238 - RNA, 19 nt, synthetic construct
  source 1..19: mol_type = other RNA
cggcaagcaatttaacact

SEQ ID NO: 1239 - RNA, 19 nt, synthetic construct
  source 1..19: mol_type = other RNA
ccggcaagcaatttaacac

SEQ ID NO: 1240 - RNA, 19 nt, synthetic construct
  source 1..19: mol_type = other RNA
accggcaagcaatttaaca

SEQ ID NO: 1241 - RNA, 19 nt, synthetic construct
  source 1..19: mol_type = other RNA
caccggcaagcaatttaac

SEQ ID NO: 1242 - RNA, 19 nt, synthetic construct
  source 1..19: mol_type = other RNA
acaccggcaagcaatttaa

SEQ ID NO: 1243 - RNA, 19 nt, synthetic construct
  source 1..19: mol_type = other RNA
aacaccggcaagcaattta

SEQ ID NO: 1244 - RNA, 19 nt, synthetic construct
  source 1..19: mol_type = other RNA
aaacaccggcaagcaattt

SEQ ID NO: 1245 - RNA, 19 nt, synthetic construct
  source 1..19: mol_type = other RNA
aaaacaccggcaagcaatt

SEQ ID NO: 1246 - RNA, 19 nt, synthetic construct
  source 1..19: mol_type = other RNA
taaaacaccggcaagcaat

SEQ ID NO: 1247 - RNA, 19 nt, synthetic construct
  source 1..19: mol_type = other RNA
ttaaaacaccggcaagcaa

SEQ ID NO: 1248 - RNA, 19 nt, synthetic construct
  source 1..19: mol_type = other RNA
cttaaaacaccggcaagca

SEQ ID NO: 1249 - RNA, 19 nt, synthetic construct
  source 1..19: mol_type = other RNA
tcttaaaacaccggcaagc

SEQ ID NO: 1250 - RNA, 19 nt, synthetic construct
  source 1..19: mol_type = other RNA
ttcttaaaacaccggcaag

SEQ ID NO: 1251 - RNA, 19 nt, synthetic construct
  source 1..19: mol_type = other RNA
tttcttaaaacaccggcaa

SEQ ID NO: 1252 - RNA, 19 nt, synthetic construct
  source 1..19: mol_type = other RNA
ctttcttaaaacaccggca

SEQ ID NO: 1253 - RNA, 19 nt, synthetic construct
  source 1..19: mol_type = other RNA
gctttcttaaaacaccggc

SEQ ID NO: 1254 - RNA, 19 nt, synthetic construct
  source 1..19: mol_type = other RNA
ggctttcttaaaacaccgg

SEQ ID NO: 1255 - RNA, 19 nt, synthetic construct
  source 1..19: mol_type = other RNA
tggctttcttaaaacaccg

SEQ ID NO: 1256 - RNA, 19 nt, synthetic construct
  source 1..19: mol_type = other RNA
ctggctttcttaaaacacc

SEQ ID NO: 1257 - RNA, 19 nt, synthetic construct
  source 1..19: mol_type = other RNA
tctggctttcttaaaacac

SEQ ID NO: 1258 - RNA, 19 nt, synthetic construct
  source 1..19: mol_type = other RNA
atctggctttcttaaaaca

SEQ ID NO: 1259 - RNA, 19 nt, synthetic construct
  source 1..19: mol_type = other RNA
catctggctttcttaaaac

SEQ ID NO: 1260 - RNA, 19 nt, synthetic construct
  source 1..19: mol_type = other RNA
gcatctggctttcttaaaa

SEQ ID NO: 1261 - RNA, 19 nt, synthetic construct
  source 1..19: mol_type = other RNA
ggcatctggctttcttaaa

SEQ ID NO: 1262 - RNA, 19 nt, synthetic construct
  source 1..19: mol_type = other RNA
aggcatctggctttcttaa

SEQ ID NO: 1263 - RNA, 19 nt, synthetic construct
  source 1..19: mol_type = other RNA
caggcatctggctttctta

SEQ ID NO: 1264 - RNA, 19 nt, synthetic construct
  source 1..19: mol_type = other RNA
ccaggcatctggctttctt

SEQ ID NO: 1265 - RNA, 19 nt, synthetic construct
  source 1..19: mol_type = other RNA
tccaggcatctggctttct

SEQ ID NO: 1266 - RNA, 19 nt, synthetic construct
  source 1..19: mol_type = other RNA
atccaggcatctggctttc

SEQ ID NO: 1267 - RNA, 19 nt, synthetic construct
  source 1..19: mol_type = other RNA
aatccaggcatctggcttt

SEQ ID NO: 1268 - RNA, 19 nt, synthetic construct
  source 1..19: mol_type = other RNA
caatccaggcatctggctt

SEQ ID NO: 1269 - RNA, 19 nt, synthetic construct
  source 1..19: mol_type = other RNA
ccaatccaggcatctggct

SEQ ID NO: 1270 - RNA, 19 nt, synthetic construct
  source 1..19: mol_type = other RNA
tccaatccaggcatctggc

SEQ ID NO: 1271 - RNA, 19 nt, synthetic construct
  source 1..19: mol_type = other RNA
gtccaatccaggcatctgg

SEQ ID NO: 1272 - RNA, 19 nt, synthetic construct
  source 1..19: mol_type = other RNA
agtccaatccaggcatctg

SEQ ID NO: 1273 - RNA, 19 nt, synthetic construct
  source 1..19: mol_type = other RNA
gagtccaatccaggcatct

SEQ ID NO: 1274 - RNA, 19 nt, synthetic construct
  source 1..19: mol_type = other RNA
agagtccaatccaggcatc

SEQ ID NO: 1275 - RNA, 19 nt, synthetic construct
  source 1..19: mol_type = other RNA
cagagtccaatccaggcat

SEQ ID NO: 1276 - RNA, 19 nt, synthetic construct
  source 1..19: mol_type = other RNA
ccagagtccaatccaggca

SEQ ID NO: 1277 - RNA, 19 nt, synthetic construct
  source 1..19: mol_type = other RNA
cccagagtccaatccaggc

SEQ ID NO: 1278 - RNA, 19 nt, synthetic construct
  source 1..19: mol_type = other RNA
ccccagagtccaatccagg

SEQ ID NO: 1279 - RNA, 19 nt, synthetic construct
  source 1..19: mol_type = other RNA
accccagagtccaatccag

SEQ ID NO: 1280 - RNA, 19 nt, synthetic construct
  source 1..19: mol_type = other RNA
caccccagagtccaatcca

SEQ ID NO: 1281 - RNA, 19 nt, synthetic construct
  source 1..19: mol_type = other RNA
acaccccagagtccaatcc

SEQ ID NO: 1282 - RNA, 19 nt, synthetic construct
  source 1..19: mol_type = other RNA
aacaccccagagtccaatc

SEQ ID NO: 1283 - RNA, 19 nt, synthetic construct
  source 1..19: mol_type = other RNA
gaacaccccagagtccaat

SEQ ID NO: 1284 - RNA, 19 nt, synthetic construct
  source 1..19: mol_type = other RNA
agaacaccccagagtccaa

SEQ ID NO: 1285 - RNA, 19 nt, synthetic construct
  source 1..19: mol_type = other RNA
gagaacaccccagagtcca

SEQ ID NO: 1286 - RNA, 19 nt, synthetic construct
  source 1..19: mol_type = other RNA
ggagaacaccccagagtcc

SEQ ID NO: 1287 - RNA, 19 nt, synthetic construct
  source 1..19: mol_type = other RNA
cggagaacaccccagagtc

SEQ ID NO: 1288 - RNA, 19 nt, synthetic construct
  source 1..19: mol_type = other RNA
tcggagaacaccccagagt

SEQ ID NO: 1289 - RNA, 19 nt, synthetic construct
  source 1..19: mol_type = other RNA
ctcggagaacaccccagag

SEQ ID NO: 1290 - RNA, 19 nt, synthetic construct
  source 1..19: mol_type = other RNA
cctcggagaacaccccaga

SEQ ID NO: 1291 - RNA, 19 nt, synthetic construct
  source 1..19: mol_type = other RNA
ccctcggagaacaccccag

SEQ ID NO: 1292 - RNA, 19 nt, synthetic construct
  source 1..19: mol_type = other RNA
tccctcggagaacacccca

SEQ ID NO: 1293 - RNA, 19 nt, synthetic construct
  source 1..19: mol_type = other RNA
gtccctcggagaacacccc

SEQ ID NO: 1294 - RNA, 19 nt, synthetic construct
  source 1..19: mol_type = other RNA
tgtccctcggagaacaccc

SEQ ID NO: 1295 - RNA, 19 nt, synthetic construct
  source 1..19: mol_type = other RNA
gtgtccctcggagaacacc

SEQ ID NO: 1296 - RNA, 19 nt, synthetic construct
  source 1..19: mol_type = other RNA
ggtgtccctcggagaacac

SEQ ID NO: 1297 - RNA, 19 nt, synthetic construct
  source 1..19: mol_type = other RNA
aggtgtccctcggagaaca

SEQ ID NO: 1298 - RNA, 19 nt, synthetic construct
  source 1..19: mol_type = other RNA
aaggtgtccctcggagaac

SEQ ID NO: 1299 - RNA, 19 nt, synthetic construct
  source 1..19: mol_type = other RNA
gaaggtgtccctcggagaa

SEQ ID NO: 1300 - RNA, 19 nt, synthetic construct
  source 1..19: mol_type = other RNA
tgaaggtgtccctcggaga

SEQ ID NO: 1301 - RNA, 19 nt, synthetic construct
  source 1..19: mol_type = other RNA
atgaaggtgtccctcggag

SEQ ID NO: 1302 - RNA, 19 nt, synthetic construct
  source 1..19: mol_type = other RNA
gatgaaggtgtccctcgga

SEQ ID NO: 1303 - RNA, 19 nt, synthetic construct
  source 1..19: mol_type = other RNA
tgatgaaggtgtccctcgg

SEQ ID NO: 1304 - RNA, 19 nt, synthetic construct
  source 1..19: mol_type = other RNA
atgatgaaggtgtccctcg

SEQ ID NO: 1305 - RNA, 19 nt, synthetic construct
  source 1..19: mol_type = other RNA
tatgatgaaggtgtccctc

SEQ ID NO: 1306 - RNA, 19 nt, synthetic construct
  source 1..19: mol_type = other RNA
gtatgatgaaggtgtccct

SEQ ID NO: 1307 - RNA, 19 nt, synthetic construct
  source 1..19: mol_type = other RNA
tgtatgatgaaggtgtccc

SEQ ID NO: 1308 - RNA, 19 nt, synthetic construct
  source 1..19: mol_type = other RNA
ttgtatgatgaaggtgtcc

SEQ ID NO: 1309 - RNA, 19 nt, synthetic construct
  source 1..19: mol_type = other RNA
tttgtatgatgaaggtgtc

SEQ ID NO: 1310 - RNA, 19 nt, synthetic construct
  source 1..19: mol_type = other RNA
gtttgtatgatgaaggtgt

SEQ ID NO: 1311 - RNA, 19 nt, synthetic construct
  source 1..19: mol_type = other RNA
agtttgtatgatgaaggtg

SEQ ID NO: 1312 - RNA, 19 nt, synthetic construct
  source 1..19: mol_type = other RNA
gagtttgtatgatgaaggt

SEQ ID NO: 1313 - RNA, 19 nt, synthetic construct
  source 1..19: mol_type = other RNA
agagtttgtatgatgaagg

SEQ ID NO: 1314 - RNA, 19 nt, synthetic construct
  source 1..19: mol_type = other RNA
cagagtttgtatgatgaag

SEQ ID NO: 1315 - RNA, 19 nt, synthetic construct
  source 1..19: mol_type = other RNA
acagagtttgtatgatgaa

SEQ ID NO: 1316 - RNA, 19 nt, synthetic construct
  source 1..19: mol_type = other RNA
tacagagtttgtatgatga

SEQ ID NO: 1317 - RNA, 19 nt, synthetic construct
  source 1..19: mol_type = other RNA
gtacagagtttgtatgatg

SEQ ID NO: 1318 - RNA, 19 nt, synthetic construct
  source 1..19: mol_type = other RNA
agtacagagtttgtatgat

SEQ ID NO: 1319 - RNA, 19 nt, synthetic construct
  source 1..19: mol_type = other RNA
aagtacagagtttgtatga

SEQ ID NO: 1320 - RNA, 19 nt, synthetic construct
  source 1..19: mol_type = other RNA
gaagtacagagtttgtatg

SEQ ID NO: 1321 - RNA, 19 nt, synthetic construct
  source 1..19: mol_type = other RNA
ggaagtacagagtttgtat

SEQ ID NO: 1322 - RNA, 19 nt, synthetic construct
  source 1..19: mol_type = other RNA
aggaagtacagagtttgta

SEQ ID NO: 1323 - RNA, 19 nt, synthetic construct
  source 1..19: mol_type = other RNA
caggaagtacagagtttgt

SEQ ID NO: 1324 - RNA, 19 nt, synthetic construct
  source 1..19: mol_type = other RNA
ccaggaagtacagagtttg

SEQ ID NO: 1325 - RNA, 19 nt, synthetic construct
  source 1..19: mol_type = other RNA
tccaggaagtacagagttt

SEQ ID NO: 1326 - RNA, 19 nt, synthetic construct
  source 1..19: mol_type = other RNA
ttccaggaagtacagagtt

SEQ ID NO: 1327 - RNA, 19 nt, synthetic construct
  source 1..19: mol_type = other RNA
attccaggaagtacagagt

SEQ ID NO: 1328 - RNA, 19 nt, synthetic construct
  source 1..19: mol_type = other RNA
gattccaggaagtacagag

SEQ ID NO: 1329 - RNA, 19 nt, synthetic construct
  source 1..19: mol_type = other RNA
cgattccaggaagtacaga

SEQ ID NO: 1330 - RNA, 19 nt, synthetic construct
  source 1..19: mol_type = other RNA
tcgattccaggaagtacag

SEQ ID NO: 1331 - RNA, 19 nt, synthetic construct
  source 1..19: mol_type = other RNA
atcgattccaggaagtaca

SEQ ID NO: 1332 - RNA, 19 nt, synthetic construct
  source 1..19: mol_type = other RNA
tatcgattccaggaagtac

SEQ ID NO: 1333 - RNA, 19 nt, synthetic construct
  source 1..19: mol_type = other RNA
gtatcgattccaggaagta

SEQ ID NO: 1334 - RNA, 19 nt, synthetic construct
  source 1..19: mol_type = other RNA
agtatcgattccaggaagt

SEQ ID NO: 1335 - RNA, 19 nt, synthetic construct
  source 1..19: mol_type = other RNA
aagtatcgattccaggaag

SEQ ID NO: 1336 - RNA, 19 nt, synthetic construct
  source 1..19: mol_type = other RNA
caagtatcgattccaggaa

SEQ ID NO: 1337 - RNA, 19 nt, synthetic construct
  source 1..19: mol_type = other RNA
acaagtatcgattccagga

SEQ ID NO: 1338 - RNA, 19 nt, synthetic construct
  source 1..19: mol_type = other RNA
tacaagtatcgattccagg

SEQ ID NO: 1339 - RNA, 19 nt, synthetic construct
  source 1..19: mol_type = other RNA
atacaagtatcgattccag

SEQ ID NO: 1340 - RNA, 19 nt, synthetic construct
  source 1..19: mol_type = other RNA
aatacaagtatcgattcca

SEQ ID NO: 1341 - RNA, 19 nt, synthetic construct
  source 1..19: mol_type = other RNA
aaatacaagtatcgattcc

SEQ ID NO: 1342 - RNA, 19 nt, synthetic construct
  source 1..19: mol_type = other RNA
aaaatacaagtatcgattc

SEQ ID NO: 1343 - RNA, 19 nt, synthetic construct
  source 1..19: mol_type = other RNA
aaaaatacaagtatcgatt

SEQ ID NO: 1344 - RNA, 19 nt, synthetic construct
  source 1..19: mol_type = other RNA
gaaaaatacaagtatcgat

SEQ ID NO: 1345 - RNA, 19 nt, synthetic construct
  source 1..19: mol_type = other RNA
agaaaaatacaagtatcga

SEQ ID NO: 1346 - RNA, 19 nt, synthetic construct
  source 1..19: mol_type = other RNA
tagaaaaatacaagtatcg

SEQ ID NO: 1347 - RNA, 19 nt, synthetic construct
  source 1..19: mol_type = other RNA
ctagaaaaatacaagtatc

SEQ ID NO: 1348 - RNA, 19 nt, synthetic construct
  source 1..19: mol_type = other RNA
actagaaaaatacaagtat

SEQ ID NO: 1349 - RNA, 19 nt, synthetic construct
  source 1..19: mol_type = other RNA
tactagaaaaatacaagta

SEQ ID NO: 1350 - RNA, 19 nt, synthetic construct
  source 1..19: mol_type = other RNA
gtactagaaaaatacaagt

SEQ ID NO: 1351 - RNA, 19 nt, synthetic construct
  source 1..19: mol_type = other RNA
ggtactagaaaaatacaag

SEQ ID NO: 1352 - RNA, 19 nt, synthetic construct
  source 1..19: mol_type = other RNA
tggtactagaaaaatacaa

SEQ ID NO: 1353 - RNA, 19 nt, synthetic construct
  source 1..19: mol_type = other RNA
ttggtactagaaaaataca

SEQ ID NO: 1354 - RNA, 19 nt, synthetic construct
  source 1..19: mol_type = other RNA
cttggtactagaaaaatac

SEQ ID NO: 1355 - RNA, 19 nt, synthetic construct
  source 1..19: mol_type = other RNA
acttggtactagaaaaata

SEQ ID NO: 1356 - RNA, 19 nt, synthetic construct
  source 1..19: mol_type = other RNA
aacttggtactagaaaaat

SEQ ID NO: 1357 - RNA, 19 nt, synthetic construct
  source 1..19: mol_type = other RNA
taacttggtactagaaaaa

SEQ ID NO: 1358 - RNA, 19 nt, synthetic construct
  source 1..19: mol_type = other RNA
gtaacttggtactagaaaa

SEQ ID NO: 1359 - RNA, 19 nt, synthetic construct
  source 1..19: mol_type = other RNA
cgtaacttggtactagaaa

SEQ ID NO: 1360 - RNA, 19 nt, synthetic construct
  source 1..19: mol_type = other RNA
acgtaacttggtactagaa

SEQ ID NO: 1361 - RNA, 19 nt, synthetic construct
  source 1..19: mol_type = other RNA
cacgtaacttggtactaga

SEQ ID NO: 1362 - RNA, 19 nt, synthetic construct
  source 1..19: mol_type = other RNA
gcacgtaacttggtactag

SEQ ID NO: 1363 - RNA, 19 nt, synthetic construct
  source 1..19: mol_type = other RNA
tgcacgtaacttggtacta

SEQ ID NO: 1364 - RNA, 19 nt, synthetic construct
  source 1..19: mol_type = other RNA
gtgcacgtaacttggtact

SEQ ID NO: 1365 - RNA, 19 nt, synthetic construct
  source 1..19: mol_type = other RNA
ggtgcacgtaacttggtac

SEQ ID NO: 1366 - RNA, 19 nt, synthetic construct
  source 1..19: mol_type = other RNA
tggtgcacgtaacttggta

SEQ ID NO: 1367 - RNA, 19 nt, synthetic construct
  source 1..19: mol_type = other RNA
ttggtgcacgtaacttggt

SEQ ID NO: 1368 - RNA, 19 nt, synthetic construct
  source 1..19: mol_type = other RNA
tttggtgcacgtaacttgg

SEQ ID NO: 1369 - RNA, 19 nt, synthetic construct
  source 1..19: mol_type = other RNA
atttggtgcacgtaacttg

SEQ ID NO: 1370 - RNA, 19 nt, synthetic construct
  source 1..19: mol_type = other RNA
aatttggtgcacgtaactt

SEQ ID NO: 1371 - RNA, 19 nt, synthetic construct
  source 1..19: mol_type = other RNA
taatttggtgcacgtaact

SEQ ID NO: 1372 - RNA, 19 nt, synthetic construct
  source 1..19: mol_type = other RNA
ataatttggtgcacgtaac

SEQ ID NO: 1373 - RNA, 19 nt, synthetic construct
  source 1..19: mol_type = other RNA
tataatttggtgcacgtaa

SEQ ID NO: 1374 - RNA, 19 nt, synthetic construct
  source 1..19: mol_type = other RNA
ttataatttggtgcacgta

SEQ ID NO: 1375 - RNA, 19 nt, synthetic construct
  source 1..19: mol_type = other RNA
tttataatttggtgcacgt

SEQ ID NO: 1376 - RNA, 19 nt, synthetic construct
  source 1..19: mol_type = other RNA
ttttataatttggtgcacg

SEQ ID NO: 1377 - RNA, 19 nt, synthetic construct
  source 1..19: mol_type = other RNA
gttttataatttggtgcac

SEQ ID NO: 1378 - RNA, 19 nt, synthetic construct
  source 1..19: mol_type = other RNA
tgttttataatttggtgca

SEQ ID NO: 1379 - RNA, 19 nt, synthetic construct
  source 1..19: mol_type = other RNA
gtgttttataatttggtgc

SEQ ID NO: 1380 - RNA, 19 nt, synthetic construct
  source 1..19: mol_type = other RNA
agtgttttataatttggtg

SEQ ID NO: 1381 - RNA, 19 nt, synthetic construct
  source 1..19: mol_type = other RNA
aagtgttttataatttggt

SEQ ID NO: 1382 - RNA, 19 nt, synthetic construct
  source 1..19: mol_type = other RNA
aaagtgttttataatttgg

SEQ ID NO: 1383 - RNA, 19 nt, synthetic construct
  source 1..19: mol_type = other RNA
aaaagtgttttataatttg

SEQ ID NO: 1384 - RNA, 19 nt, synthetic construct
  source 1..19: mol_type = other RNA
aaaaagtgttttataattt

SEQ ID NO: 1385 - RNA, 19 nt, synthetic construct
  source 1..19: mol_type = other RNA
aaaaaagtgttttataatt

SEQ ID NO: 1386 - RNA, 19 nt, synthetic construct
  source 1..19: mol_type = other RNA
taaaaaagtgttttataat

SEQ ID NO: 1387 - RNA, 19 nt, synthetic construct
  source 1..19: mol_type = other RNA
ataaaaaagtgttttataa

SEQ ID NO: 1388 - RNA, 19 nt, synthetic construct
  source 1..19: mol_type = other RNA
tataaaaaagtgttttata

SEQ ID NO: 1389 - RNA, 19 nt, synthetic construct
  source 1..19: mol_type = other RNA
ttataaaaaagtgttttat

SEQ ID NO: 1390 - RNA, 19 nt, synthetic construct
  source 1..19: mol_type = other RNA
attataaaaaagtgtttta

SEQ ID NO: 1391 - RNA, 19 nt, synthetic construct
  source 1..19: mol_type = other RNA
tattataaaaaagtgtttt

SEQ ID NO: 1392 - RNA, 19 nt, synthetic construct
  source 1..19: mol_type = other RNA
atattataaaaaagtgttt

SEQ ID NO: 1393 - RNA, 19 nt, synthetic construct
  source 1..19: mol_type = other RNA
aatattataaaaaagtgtt

SEQ ID NO: 1394 - RNA, 19 nt, synthetic construct
  source 1..19: mol_type = other RNA
aaatattataaaaaagtgt

SEQ ID NO: 1395 - RNA, 19 nt, synthetic construct
  source 1..19: mol_type = other RNA
aaaatattataaaaaagtg

SEQ ID NO: 1396 - RNA, 19 nt, synthetic construct
  source 1..19: mol_type = other RNA
gaaaatattataaaaaagt

SEQ ID NO: 1397 - RNA, 19 nt, synthetic construct
  source 1..19: mol_type = other RNA
agaaaatattataaaaaag

SEQ ID NO: 1398 - RNA, 19 nt, synthetic construct
  source 1..19: mol_type = other RNA
gagaaaatattataaaaaa

SEQ ID NO: 1399 - RNA, 19 nt, synthetic construct
  source 1..19: mol_type = other RNA
tgagaaaatattataaaaa

SEQ ID NO: 1400 - RNA, 19 nt, synthetic construct
  source 1..19: mol_type = other RNA
gtgagaaaatattataaaa

SEQ ID NO: 1401 - RNA, 19 nt, synthetic construct
  source 1..19: mol_type = other RNA
agtgagaaaatattataaa

SEQ ID NO: 1402 - RNA, 19 nt, synthetic construct
  source 1..19: mol_type = other RNA
cagtgagaaaatattataa

SEQ ID NO: 1403 - RNA, 19 nt, synthetic construct
  source 1..19: mol_type = other RNA
tcagtgagaaaatattata

SEQ ID NO: 1404 - RNA, 19 nt, synthetic construct
  source 1..19: mol_type = other RNA
ctcagtgagaaaatattat

SEQ ID NO: 1405 - RNA, 19 nt, synthetic construct
  source 1..19: mol_type = other RNA
tctcagtgagaaaatatta

SEQ ID NO: 1406 - RNA, 19 nt, synthetic construct
  source 1..19: mol_type = other RNA
gtctcagtgagaaaatatt

SEQ ID NO: 1407 - RNA, 19 nt, synthetic construct
  source 1..19: mol_type = other RNA
agtctcagtgagaaaatat

SEQ ID NO: 1408 - RNA, 19 nt, synthetic construct
  source 1..19: mol_type = other RNA
gagtctcagtgagaaaata

SEQ ID NO: 1409 - RNA, 19 nt, synthetic construct
  source 1..19: mol_type = other RNA
ggagtctcagtgagaaaat

SEQ ID NO: 1410 - RNA, 19 nt, synthetic construct
  source 1..19: mol_type = other RNA
gggagtctcagtgagaaaa

SEQ ID NO: 1411 - RNA, 19 nt, synthetic construct
  source 1..19: mol_type = other RNA
tgggagtctcagtgagaaa

SEQ ID NO: 1412 - RNA, 19 nt, synthetic construct
  source 1..19: mol_type = other RNA
ctgggagtctcagtgagaa

SEQ ID NO: 1413 - RNA, 19 nt, synthetic construct
  source 1..19: mol_type = other RNA
cctgggagtctcagtgaga

SEQ ID NO: 1414 - RNA, 19 nt, synthetic construct
  source 1..19: mol_type = other RNA
ccctgggagtctcagtgag

SEQ ID NO: 1415 - RNA, 19 nt, synthetic construct
  source 1..19: mol_type = other RNA
gccctgggagtctcagtga

SEQ ID NO: 1416 - RNA, 19 nt, synthetic construct
  source 1..19: mol_type = other RNA
agccctgggagtctcagtg

SEQ ID NO: 1417 - RNA, 19 nt, synthetic construct
  source 1..19: mol_type = other RNA
aagccctgggagtctcagt

SEQ ID NO: 1418 - RNA, 19 nt, synthetic construct
  source 1..19: mol_type = other RNA
aaagccctgggagtctcag

SEQ ID NO: 1419 - RNA, 19 nt, synthetic construct
  source 1..19: mol_type = other RNA
aaaagccctgggagtctca

SEQ ID NO: 1420 - RNA, 19 nt, synthetic construct
  source 1..19: mol_type = other RNA
taaaagccctgggagtctc

SEQ ID NO: 1421 - RNA, 19 nt, synthetic construct
  source 1..19: mol_type = other RNA
gtaaaagccctgggagtct

SEQ ID NO: 1422 - RNA, 19 nt, synthetic construct
  source 1..19: mol_type = other RNA
agtaaaagccctgggagtc

SEQ ID NO: 1423 - RNA, 19 nt, synthetic construct
  source 1..19: mol_type = other RNA
tagtaaaagccctgggagt

SEQ ID NO: 1424 - RNA, 19 nt, synthetic construct
  source 1..19: mol_type = other RNA
atagtaaaagccctgggag

SEQ ID NO: 1425 - RNA, 19 nt, synthetic construct
  source 1..19: mol_type = other RNA
gatagtaaaagccctggga

SEQ ID NO: 1426 - RNA, 19 nt, synthetic construct
  source 1..19: mol_type = other RNA
agatagtaaaagccctggg

SEQ ID NO: 1427 - RNA, 19 nt, synthetic construct
  source 1..19: mol_type = other RNA
gagatagtaaaagccctgg

SEQ ID NO: 1428 - RNA, 19 nt, synthetic construct
  source 1..19: mol_type = other RNA
ggagatagtaaaagccctg

SEQ ID NO: 1429 - RNA, 19 nt, synthetic construct
  source 1..19: mol_type = other RNA
tggagatagtaaaagccct

SEQ ID NO: 1430 - RNA, 19 nt, synthetic construct
  source 1..19: mol_type = other RNA
ctggagatagtaaaagccc

SEQ ID NO: 1431 - RNA, 19 nt, synthetic construct
  source 1..19: mol_type = other RNA
tctggagatagtaaaagcc

SEQ ID NO: 1432 - RNA, 19 nt, synthetic construct
  source 1..19: mol_type = other RNA
ttctggagatagtaaaagc

SEQ ID NO: 1433 - RNA, 19 nt, synthetic construct
  source 1..19: mol_type = other RNA
attctggagatagtaaaag

SEQ ID NO: 1434 - RNA, 19 nt, synthetic construct
  source 1..19: mol_type = other RNA
cattctggagatagtaaaa

SEQ ID NO: 1435 - RNA, 19 nt, synthetic construct
  source 1..19: mol_type = other RNA
acattctggagatagtaaa

SEQ ID NO: 1436 - RNA, 19 nt, synthetic construct
  source 1..19: mol_type = other RNA
tacattctggagatagtaa

SEQ ID NO: 1437 - RNA, 19 nt, synthetic construct
  source 1..19: mol_type = other RNA
atacattctggagatagta

SEQ ID NO: 1438 - RNA, 19 nt, synthetic construct
  source 1..19: mol_type = other RNA
aatacattctggagatagt

SEQ ID NO: 1439 - RNA, 19 nt, synthetic construct
  source 1..19: mol_type = other RNA
aaatacattctggagatag

SEQ ID NO: 1440 - RNA, 19 nt, synthetic construct
  source 1..19: mol_type = other RNA
aaaatacattctggagata

SEQ ID NO: 1441 - RNA, 19 nt, synthetic construct
  source 1..19: mol_type = other RNA
aaaaatacattctggagat

SEQ ID NO: 1442 - RNA, 19 nt, synthetic construct
  source 1..19: mol_type = other RNA
gaaaaatacattctggaga

SEQ ID NO: 1443 - RNA, 19 nt, synthetic construct
  source 1..19: mol_type = other RNA
ggaaaaatacattctggag

SEQ ID NO: 1444 - RNA, 19 nt, synthetic construct
  source 1..19: mol_type = other RNA
aggaaaaatacattctgga

SEQ ID NO: 1445 - RNA, 19 nt, synthetic construct
  source 1..19: mol_type = other RNA
aaggaaaaatacattctgg

SEQ ID NO: 1446 - RNA, 19 nt, synthetic construct
  source 1..19: mol_type = other RNA
aaaggaaaaatacattctg

SEQ ID NO: 1447 - RNA, 19 nt, synthetic construct
  source 1..19: mol_type = other RNA
aaaaggaaaaatacattct

SEQ ID NO: 1448 - RNA, 19 nt, synthetic construct
  source 1..19: mol_type = other RNA
aaaaaggaaaaatacattc

SEQ ID NO: 1449 - RNA, 19 nt, synthetic construct
  source 1..19: mol_type = other RNA
gaaaaaggaaaaatacatt

SEQ ID NO: 1450 - RNA, 19 nt, synthetic construct
  source 1..19: mol_type = other RNA
ggaaaaaggaaaaatacat

SEQ ID NO: 1451 - RNA, 19 nt, synthetic construct
  source 1..19: mol_type = other RNA
cggaaaaaggaaaaataca

SEQ ID NO: 1452 - RNA, 19 nt, synthetic construct
  source 1..19: mol_type = other RNA
acggaaaaaggaaaaatac

SEQ ID NO: 1453 - RNA, 19 nt, synthetic construct
  source 1..19: mol_type = other RNA
tacggaaaaaggaaaaata

SEQ ID NO: 1454 - RNA, 19 nt, synthetic construct
  source 1..19: mol_type = other RNA
ttacggaaaaaggaaaaat

SEQ ID NO: 1455 - RNA, 19 nt, synthetic construct
  source 1..19: mol_type = other RNA
cttacggaaaaaggaaaaa

SEQ ID NO: 1456 - RNA, 19 nt, synthetic construct
  source 1..19: mol_type = other RNA
tcttacggaaaaaggaaaa

SEQ ID NO: 1457 - RNA, 19 nt, synthetic construct
  source 1..19: mol_type = other RNA
gtcttacggaaaaaggaaa

SEQ ID NO: 1458 - RNA, 19 nt, synthetic construct
  source 1..19: mol_type = other RNA
agtcttacggaaaaaggaa

SEQ ID NO: 1459 - RNA, 19 nt, synthetic construct
  source 1..19: mol_type = other RNA
gagtcttacggaaaaagga

SEQ ID NO: 1460 - RNA, 19 nt, synthetic construct
  source 1..19: mol_type = other RNA
tgagtcttacggaaaaagg

SEQ ID NO: 1461 - RNA, 19 nt, synthetic construct
  source 1..19: mol_type = other RNA
ttgagtcttacggaaaaag

SEQ ID NO: 1462 - RNA, 19 nt, synthetic construct
  source 1..19: mol_type = other RNA
tttgagtcttacggaaaaa

SEQ ID NO: 1463 - RNA, 19 nt, synthetic construct
  source 1..19: mol_type = other RNA
ttttgagtcttacggaaaa

SEQ ID NO: 1464 - RNA, 19 nt, synthetic construct
  source 1..19: mol_type = other RNA
cttttgagtcttacggaaa

SEQ ID NO: 1465 - RNA, 19 nt, synthetic construct
  source 1..19: mol_type = other RNA
acttttgagtcttacggaa

SEQ ID NO: 1466 - RNA, 19 nt, synthetic construct
  source 1..19: mol_type = other RNA
tacttttgagtcttacgga

SEQ ID NO: 1467 - RNA, 19 nt, synthetic construct
  source 1..19: mol_type = other RNA
ttacttttgagtcttacgg

SEQ ID NO: 1468 - RNA, 19 nt, synthetic construct
  source 1..19: mol_type = other RNA
attacttttgagtcttacg

SEQ ID NO: 1469 - RNA, 19 nt, synthetic construct
  source 1..19: mol_type = other RNA
tattacttttgagtcttac

SEQ ID NO: 1470 - RNA, 19 nt, synthetic construct
  source 1..19: mol_type = other RNA
atattacttttgagtctta

SEQ ID NO: 1471 - RNA, 19 nt, synthetic construct
  source 1..19: mol_type = other RNA
tatattacttttgagtctt

SEQ ID NO: 1472 - RNA, 19 nt, synthetic construct
  source 1..19: mol_type = other RNA
ttatattacttttgagtct

SEQ ID NO: 1473 - RNA, 19 nt, synthetic construct
  source 1..19: mol_type = other RNA
cttatattacttttgagtc

SEQ ID NO: 1474 - RNA, 19 nt, synthetic construct
  source 1..19: mol_type = other RNA
ccttatattacttttgagt

SEQ ID NO: 1475 - RNA, 19 nt, synthetic construct
  source 1..19: mol_type = other RNA
accttatattacttttgag

SEQ ID NO: 1476 - RNA, 19 nt, synthetic construct
  source 1..19: mol_type = other RNA
gaccttatattacttttga

SEQ ID NO: 1477 - RNA, 19 nt, synthetic construct
  source 1..19: mol_type = other RNA
agaccttatattacttttg

SEQ ID NO: 1478 - RNA, 19 nt, synthetic construct
  source 1..19: mol_type = other RNA
tagaccttatattactttt

SEQ ID NO: 1479 - RNA, 19 nt, synthetic construct
  source 1..19: mol_type = other RNA
gtagaccttatattacttt

SEQ ID NO: 1480 - RNA, 19 nt, synthetic construct
  source 1..19: mol_type = other RNA
tgtagaccttatattactt

SEQ ID NO: 1481 - RNA, 19 nt, synthetic construct
  source 1..19: mol_type = other RNA
ttgtagaccttatattact

SEQ ID NO: 1482 - RNA, 19 nt, synthetic construct
  source 1..19: mol_type = other RNA
tttgtagaccttatattac

SEQ ID NO: 1483 - RNA, 19 nt, synthetic construct
  source 1..19: mol_type = other RNA
ttttgtagaccttatatta

SEQ ID NO: 1484 - RNA, 19 nt, synthetic construct
  source 1..19: mol_type = other RNA
attttgtagaccttatatt

SEQ ID NO: 1485 - RNA, 19 nt, synthetic construct
  source 1..19: mol_type = other RNA
gattttgtagaccttatat

SEQ ID NO: 1486 - RNA, 19 nt, synthetic construct
  source 1..19: mol_type = other RNA
agattttgtagaccttata

SEQ ID NO: 1487 - RNA, 19 nt, synthetic construct
  source 1..19: mol_type = other RNA
tagattttgtagaccttat

SEQ ID NO: 1488 - RNA, 19 nt, synthetic construct
  source 1..19: mol_type = other RNA
gtagattttgtagacctta

SEQ ID NO: 1489 - RNA, 19 nt, synthetic construct
  source 1..19: mol_type = other RNA
agtagattttgtagacctt

SEQ ID NO: 1490 - RNA, 19 nt, synthetic construct
  source 1..19: mol_type = other RNA
tagtagattttgtagacct

SEQ ID NO: 1491 - RNA, 19 nt, synthetic construct
  source 1..19: mol_type = other RNA
ttagtagattttgtagacc

SEQ ID NO: 1492 - RNA, 19 nt, synthetic construct
  source 1..19: mol_type = other RNA
tttagtagattttgtagac

SEQ ID NO: 1493 - RNA, 19 nt, synthetic construct
  source 1..19: mol_type = other RNA
ttttagtagattttgtaga

SEQ ID NO: 1494 - RNA, 19 nt, synthetic construct
  source 1..19: mol_type = other RNA
tttttagtagattttgtag

SEQ ID NO: 1495 - RNA, 19 nt, synthetic construct
  source 1..19: mol_type = other RNA
ctttttagtagattttgta

SEQ ID NO: 1496 - RNA, 19 nt, synthetic construct
  source 1..19: mol_type = other RNA
actttttagtagattttgt

SEQ ID NO: 1497 - RNA, 19 nt, synthetic construct
  source 1..19: mol_type = other RNA
gactttttagtagattttg

SEQ ID NO: 1498 - RNA, 19 nt, synthetic construct
  source 1..19: mol_type = other RNA
agactttttagtagatttt

SEQ ID NO: 1499 - RNA, 19 nt, synthetic construct
  source 1..19: mol_type = other RNA
gagactttttagtagattt

SEQ ID NO: 1500 - RNA, 19 nt, synthetic construct
  source 1..19: mol_type = other RNA
agagactttttagtagatt

SEQ ID NO: 1501 - RNA, 19 nt, synthetic construct
  source 1..19: mol_type = other RNA
cagagactttttagtagat

SEQ ID NO: 1502 - RNA, 19 nt, synthetic construct
  source 1..19: mol_type = other RNA
gcagagactttttagtaga

SEQ ID NO: 1503 - RNA, 19 nt, synthetic construct
  source 1..19: mol_type = other RNA
tgcagagactttttagtag

SEQ ID NO: 1504 - RNA, 19 nt, synthetic construct
  source 1..19: mol_type = other RNA
ttgcagagactttttagta

SEQ ID NO: 1505 - RNA, 19 nt, synthetic construct
  source 1..19: mol_type = other RNA
tttgcagagactttttagt

SEQ ID NO: 1506 - RNA, 19 nt, synthetic construct
  source 1..19: mol_type = other RNA
ttttgcagagactttttag

SEQ ID NO: 1507 - RNA, 19 nt, synthetic construct
  source 1..19: mol_type = other RNA
tttttgcagagacttttta

SEQ ID NO: 1508 - RNA, 19 nt, synthetic construct
  source 1..19: mol_type = other RNA
ctttttgcagagacttttt

SEQ ID NO: 1509 - RNA, 19 nt, synthetic construct
  source 1..19: mol_type = other RNA
actttttgcagagactttt

SEQ ID NO: 1510 - RNA, 19 nt, synthetic construct
  source 1..19: mol_type = other RNA
tactttttgcagagacttt

SEQ ID NO: 1511 - RNA, 19 nt, synthetic construct
  source 1..19: mol_type = other RNA
ctactttttgcagagactt

SEQ ID NO: 1512 - RNA, 19 nt, synthetic construct
  source 1..19: mol_type = other RNA
tctactttttgcagagact

SEQ ID NO: 1513 - RNA, 19 nt, synthetic construct
  source 1..19: mol_type = other RNA
atctactttttgcagagac

SEQ ID NO: 1514 - RNA, 19 nt, synthetic construct
  source 1..19: mol_type = other RNA
catctactttttgcagaga

SEQ ID NO: 1515 - RNA, 19 nt, synthetic construct
  source 1..19: mol_type = other RNA
tcatctactttttgcagag

SEQ ID NO: 1516 - RNA, 19 nt, synthetic construct
  source 1..19: mol_type = other RNA
ttcatctactttttgcaga

SEQ ID NO: 1517 - RNA, 19 nt, synthetic construct
  source 1..19: mol_type = other RNA
cttcatctactttttgcag

SEQ ID NO: 1518 - RNA, 19 nt, synthetic construct
  source 1..19: mol_type = other RNA
tcttcatctactttttgca

SEQ ID NO: 1519 - RNA, 19 nt, synthetic construct
  source 1..19: mol_type = other RNA
ctcttcatctactttttgc

SEQ ID NO: 1520 - RNA, 19 nt, synthetic construct
  source 1..19: mol_type = other RNA
cctcttcatctactttttg

SEQ ID NO: 1521 - RNA, 19 nt, synthetic construct
  source 1..19: mol_type = other RNA
tcctcttcatctacttttt

SEQ ID NO: 1522 - RNA, 19 nt, synthetic construct
  source 1..19: mol_type = other RNA
gtcctcttcatctactttt

SEQ ID NO: 1523 - RNA, 19 nt, synthetic construct
  source 1..19: mol_type = other RNA
agtcctcttcatctacttt

SEQ ID NO: 1524 - RNA, 19 nt, synthetic construct
  source 1..19: mol_type = other RNA
gagtcctcttcatctactt

SEQ ID NO: 1525 - RNA, 19 nt, synthetic construct
  source 1..19: mol_type = other RNA
agagtcctcttcatctact

SEQ ID NO: 1526 - RNA, 19 nt, synthetic construct
  source 1..19: mol_type = other RNA
cagagtcctcttcatctac

SEQ ID NO: 1527 - RNA, 19 nt, synthetic construct
  source 1..19: mol_type = other RNA
tcagagtcctcttcatcta

SEQ ID NO: 1528 - RNA, 19 nt, synthetic construct
  source 1..19: mol_type = other RNA
atcagagtcctcttcatct

SEQ ID NO: 1529 - RNA, 19 nt, synthetic construct
  source 1..19: mol_type = other RNA
catcagagtcctcttcatc

SEQ ID NO: 1530 - RNA, 19 nt, synthetic construct
  source 1..19: mol_type = other RNA
tcatcagagtcctcttcat

SEQ ID NO: 1531 - RNA, 19 nt, synthetic construct
  source 1..19: mol_type = other RNA
ttcatcagagtcctcttca

SEQ ID NO: 1532 - RNA, 19 nt, synthetic construct
  source 1..19: mol_type = other RNA
cttcatcagagtcctcttc

SEQ ID NO: 1533 - RNA, 19 nt, synthetic construct
  source 1..19: mol_type = other RNA
tcttcatcagagtcctctt

SEQ ID NO: 1534 - RNA, 19 nt, synthetic construct
  source 1..19: mol_type = other RNA
ttcttcatcagagtcctct

SEQ ID NO: 1535 - RNA, 19 nt, synthetic construct
  source 1..19: mol_type = other RNA
tttcttcatcagagtcctc

SEQ ID NO: 1536 - RNA, 19 nt, synthetic construct
  source 1..19: mol_type = other RNA
ctttcttcatcagagtcct

SEQ ID NO: 1537 - RNA, 19 nt, synthetic construct
  source 1..19: mol_type = other RNA
gctttcttcatcagagtcc

SEQ ID NO: 1538 - RNA, 19 nt, synthetic construct
  source 1..19: mol_type = other RNA
ggctttcttcatcagagtc

SEQ ID NO: 1539 - RNA, 19 nt, synthetic construct
  source 1..19: mol_type = other RNA
tggctttcttcatcagagt

SEQ ID NO: 1540 - RNA, 19 nt, synthetic construct
  source 1..19: mol_type = other RNA
atggctttcttcatcagag

SEQ ID NO: 1541 - RNA, 19 nt, synthetic construct
  source 1..19: mol_type = other RNA
gatggctttcttcatcaga

SEQ ID NO: 1542 - RNA, 19 nt, synthetic construct
  source 1..19: mol_type = other RNA
tgatggctttcttcatcag

SEQ ID NO: 1543 - RNA, 19 nt, synthetic construct
  source 1..19: mol_type = other RNA
atgatggctttcttcatca

SEQ ID NO: 1544 - RNA, 19 nt, synthetic construct
  source 1..19: mol_type = other RNA
catgatggctttcttcatc

SEQ ID NO: 1545 - RNA, 19 nt, synthetic construct
  source 1..19: mol_type = other RNA
tcatgatggctttcttcat

SEQ ID NO: 1546 - RNA, 19 nt, synthetic construct
  source 1..19: mol_type = other RNA
atcatgatggctttcttca

SEQ ID NO: 1547 - RNA, 19 nt, synthetic construct
  source 1..19: mol_type = other RNA
catcatgatggctttcttc

SEQ ID NO: 1548 - RNA, 19 nt, synthetic construct
  source 1..19: mol_type = other RNA
tcatcatgatggctttctt

SEQ ID NO: 1549 - RNA, 19 nt, synthetic construct
  source 1..19: mol_type = other RNA
ctcatcatgatggctttct

SEQ ID NO: 1550 - RNA, 19 nt, synthetic construct
  source 1..19: mol_type = other RNA
tctcatcatgatggctttc

SEQ ID NO: 1551 - RNA, 19 nt, synthetic construct
  source 1..19: mol_type = other RNA
atctcatcatgatggcttt

SEQ ID NO: 1552 - RNA, 19 nt, synthetic construct
  source 1..19: mol_type = other RNA
catctcatcatgatggctt

SEQ ID NO: 1553 - RNA, 19 nt, synthetic construct
  source 1..19: mol_type = other RNA
tcatctcatcatgatggct

SEQ ID NO: 1554 - RNA, 19 nt, synthetic construct
  source 1..19: mol_type = other RNA
ctcatctcatcatgatggc

SEQ ID NO: 1555 - RNA, 19 nt, synthetic construct
  source 1..19: mol_type = other RNA
actcatctcatcatgatgg

SEQ ID NO: 1556 - RNA, 19 nt, synthetic construct
  source 1..19: mol_type = other RNA
cactcatctcatcatgatg

SEQ ID NO: 1557 - RNA, 19 nt, synthetic construct
  source 1..19: mol_type = other RNA
tcactcatctcatcatgat

SEQ ID NO: 1558 - RNA, 19 nt, synthetic construct
  source 1..19: mol_type = other RNA
ctcactcatctcatcatga

SEQ ID NO: 1559 - RNA, 19 nt, synthetic construct
  source 1..19: mol_type = other RNA
gctcactcatctcatcatg

SEQ ID NO: 1560 - RNA, 19 nt, synthetic construct
  source 1..19: mol_type = other RNA
tgctcactcatctcatcat

SEQ ID NO: 1561 - RNA, 19 nt, synthetic construct
  source 1..19: mol_type = other RNA
ctgctcactcatctcatca

SEQ ID NO: 1562 - RNA, 19 nt, synthetic construct
  source 1..19: mol_type = other RNA
cctgctcactcatctcatc

SEQ ID NO: 1563 - RNA, 19 nt, synthetic construct
  source 1..19: mol_type = other RNA
tcctgctcactcatctcat

SEQ ID NO: 1564 - RNA, 19 nt, synthetic construct
  source 1..19: mol_type = other RNA
ttcctgctcactcatctca

SEQ ID NO: 1565 - RNA, 19 nt, synthetic construct
  source 1..19: mol_type = other RNA
cttcctgctcactcatctc

SEQ ID NO: 1566 - RNA, 19 nt, synthetic construct
  source 1..19: mol_type = other RNA
tcttcctgctcactcatct

SEQ ID NO: 1567 - RNA, 19 nt, synthetic construct
  source 1..19: mol_type = other RNA
ctcttcctgctcactcatc

SEQ ID NO: 1568 - RNA, 19 nt, synthetic construct
  source 1..19: mol_type = other RNA
cctcttcctgctcactcat

SEQ ID NO: 1569 - RNA, 19 nt, synthetic construct
  source 1..19: mol_type = other RNA
tcctcttcctgctcactca

SEQ ID NO: 1570 - RNA, 19 nt, synthetic construct
  source 1..19: mol_type = other RNA
ctcctcttcctgctcactc

SEQ ID NO: 1571 - RNA, 19 nt, synthetic construct
  source 1..19: mol_type = other RNA
gctcctcttcctgctcact

SEQ ID NO: 1572 - RNA, 19 nt, synthetic construct
  source 1..19: mol_type = other RNA
agctcctcttcctgctcac

SEQ ID NO: 1573 - RNA, 19 nt, synthetic construct
  source 1..19: mol_type = other RNA
aagctcctcttcctgctca

SEQ ID NO: 1574 - RNA, 19 nt, synthetic construct
  source 1..19: mol_type = other RNA
caagctcctcttcctgctc

SEQ ID NO: 1575 - RNA, 19 nt, synthetic construct
  source 1..19: mol_type = other RNA
tcaagctcctcttcctgct

SEQ ID NO: 1576 - RNA, 19 nt, synthetic construct
  source 1..19: mol_type = other RNA
ctcaagctcctcttcctgc

SEQ ID NO: 1577 - RNA, 19 nt, synthetic construct
  source 1..19: mol_type = other RNA
cctcaagctcctcttcctg

SEQ ID NO: 1578 - RNA, 19 nt, synthetic construct
  source 1..19: mol_type = other RNA
tcctcaagctcctcttcct

SEQ ID NO: 1579 - RNA, 19 nt, synthetic construct
  source 1..19: mol_type = other RNA
atcctcaagctcctcttcc

SEQ ID NO: 1580 - RNA, 19 nt, synthetic construct
  source 1..19: mol_type = other RNA
catcctcaagctcctcttc

SEQ ID NO: 1581 - RNA, 19 nt, synthetic construct
  source 1..19: mol_type = other RNA
tcatcctcaagctcctctt

SEQ ID NO: 1582 - RNA, 19 nt, synthetic construct
  source 1..19: mol_type = other RNA
atcatcctcaagctcctct

SEQ ID NO: 1583 - RNA, 19 nt, synthetic construct
  source 1..19: mol_type = other RNA
gatcatcctcaagctcctc

SEQ ID NO: 1584 - RNA, 19 nt, synthetic construct
  source 1..19: mol_type = other RNA
ggatcatcctcaagctcct

SEQ ID NO: 1585 - RNA, 19 nt, synthetic construct
  source 1..19: mol_type = other RNA
aggatcatcctcaagctcc

SEQ ID NO: 1586 - RNA, 19 nt, synthetic construct
  source 1..19: mol_type = other RNA
taggatcatcctcaagctc

SEQ ID NO: 1587 - RNA, 19 nt, synthetic construct
  source 1..19: mol_type = other RNA
gtaggatcatcctcaagct

SEQ ID NO: 1588 - RNA, 19 nt, synthetic construct
  source 1..19: mol_type = other RNA
agtaggatcatcctcaagc

SEQ ID NO: 1589 - RNA, 19 nt, synthetic construct
  source 1..19: mol_type = other RNA
cagtaggatcatcctcaag

SEQ ID NO: 1590 - RNA, 19 nt, synthetic construct
  source 1..19: mol_type = other RNA
acagtaggatcatcctcaa

SEQ ID NO: 1591 - RNA, 19 nt, synthetic construct
  source 1..19: mol_type = other RNA
tacagtaggatcatcctca

SEQ ID NO: 1592 - RNA, 19 nt, synthetic construct
  source 1..19: mol_type = other RNA
ctacagtaggatcatcctc

SEQ ID NO: 1593 - RNA, 19 nt, synthetic construct
  source 1..19: mol_type = other RNA
actacagtaggatcatcct

SEQ ID NO: 1594 - RNA, 19 nt, synthetic construct
  source 1..19: mol_type = other RNA
gactacagtaggatcatcc

SEQ ID NO: 1595 - RNA, 19 nt, synthetic construct
  source 1..19: mol_type = other RNA
tgactacagtaggatcatc

SEQ ID NO: 1596 - RNA, 19 nt, synthetic construct
  source 1..19: mol_type = other RNA
ttgactacagtaggatcat

SEQ ID NO: 1597 - RNA, 19 nt, synthetic construct
  source 1..19: mol_type = other RNA
tttgactacagtaggatca

SEQ ID NO: 1598 - RNA, 19 nt, synthetic construct
  source 1..19: mol_type = other RNA
ttttgactacagtaggatc

SEQ ID NO: 1599 - RNA, 19 nt, synthetic construct
  source 1..19: mol_type = other RNA
tttttgactacagtaggat

SEQ ID NO: 1600 - RNA, 19 nt, synthetic construct
  source 1..19: mol_type = other RNA
gtttttgactacagtagga

SEQ ID NO: 1601 - RNA, 19 nt, synthetic construct
  source 1..19: mol_type = other RNA
agtttttgactacagtagg

SEQ ID NO: 1602 - RNA, 19 nt, synthetic construct
  source 1..19: mol_type = other RNA
tagtttttgactacagtag

SEQ ID NO: 1603 - RNA, 19 nt, synthetic construct
  source 1..19: mol_type = other RNA
atagtttttgactacagta

SEQ ID NO: 1604 - RNA, 19 nt, synthetic construct
  source 1..19: mol_type = other RNA
tatagtttttgactacagt

SEQ ID NO: 1605 - RNA, 19 nt, synthetic construct
  source 1..19: mol_type = other RNA
ttatagtttttgactacag

SEQ ID NO: 1606 - RNA, 19 nt, synthetic construct
  source 1..19: mol_type = other RNA
tttatagtttttgactaca

SEQ ID NO: 1607 - RNA, 19 nt, synthetic construct
  source 1..19: mol_type = other RNA
ctttatagtttttgactac

SEQ ID NO: 1608 - RNA, 19 nt, synthetic construct
  source 1..19: mol_type = other RNA
tctttatagtttttgacta

SEQ ID NO: 1609 - RNA, 19 nt, synthetic construct
  source 1..19: mol_type = other RNA
gtctttatagtttttgact

SEQ ID NO: 1610 - RNA, 19 nt, synthetic construct
  source 1..19: mol_type = other RNA
ggtctttatagtttttgac

SEQ ID NO: 1611 - RNA, 19 nt, synthetic construct
  source 1..19: mol_type = other RNA
aggtctttatagtttttga

SEQ ID NO: 1612 - RNA, 19 nt, synthetic construct
  source 1..19: mol_type = other RNA
caggtctttatagtttttg

SEQ ID NO: 1613 - RNA, 19 nt, synthetic construct
  source 1..19: mol_type = other RNA
ccaggtctttatagttttt

SEQ ID NO: 1614 - RNA, 19 nt, synthetic construct
  source 1..19: mol_type = other RNA
tccaggtctttatagtttt

SEQ ID NO: 1615 - RNA, 19 nt, synthetic construct
  source 1..19: mol_type = other RNA
ttccaggtctttatagttt

SEQ ID NO: 1616 - RNA, 19 nt, synthetic construct
  source 1..19: mol_type = other RNA
tttccaggtctttatagtt

SEQ ID NO: 1617 - RNA, 19 nt, synthetic construct
  source 1..19: mol_type = other RNA
ttttccaggtctttatagt

SEQ ID NO: 1618 - RNA, 19 nt, synthetic construct
  source 1..19: mol_type = other RNA
tttttccaggtctttatag

SEQ ID NO: 1619 - RNA, 19 nt, synthetic construct
  source 1..19: mol_type = other RNA
ctttttccaggtctttata

SEQ ID NO: 1620 - RNA, 19 nt, synthetic construct
  source 1..19: mol_type = other RNA
gctttttccaggtctttat

SEQ ID NO: 1621 - RNA, 19 nt, synthetic construct
  source 1..19: mol_type = other RNA
tgctttttccaggtcttta

SEQ ID NO: 1622 - RNA, 19 nt, synthetic construct
  source 1..19: mol_type = other RNA
ctgctttttccaggtcttt

SEQ ID NO: 1623 - RNA, 19 nt, synthetic construct
  source 1..19: mol_type = other RNA
actgctttttccaggtctt

SEQ ID NO: 1624 - RNA, 19 nt, synthetic construct
  source 1..19: mol_type = other RNA
aactgctttttccaggtct

SEQ ID NO: 1625 - RNA, 19 nt, synthetic construct
  source 1..19: mol_type = other RNA
gaactgctttttccaggtc

SEQ ID NO: 1626 - RNA, 19 nt, synthetic construct
  source 1..19: mol_type = other RNA
tgaactgctttttccaggt

SEQ ID NO: 1627 - RNA, 19 nt, synthetic construct
  source 1..19: mol_type = other RNA
ctgaactgctttttccagg

SEQ ID NO: 1628 - RNA, 19 nt, synthetic construct
  source 1..19: mol_type = other RNA
actgaactgctttttccag

SEQ ID NO: 1629 - RNA, 19 nt, synthetic construct
  source 1..19: mol_type = other RNA
gactgaactgctttttcca

SEQ ID NO: 1630 - RNA, 19 nt, synthetic construct
  source 1..19: mol_type = other RNA
agactgaactgctttttcc

SEQ ID NO: 1631 - RNA, 19 nt, synthetic construct
  source 1..19: mol_type = other RNA
aagactgaactgctttttc

SEQ ID NO: 1632 - RNA, 19 nt, synthetic construct
  source 1..19: mol_type = other RNA
aaagactgaactgcttttt

SEQ ID NO: 1633 - RNA, 19 nt, synthetic construct
  source 1..19: mol_type = other RNA
aaaagactgaactgctttt

SEQ ID NO: 1634 - RNA, 19 nt, synthetic construct
  source 1..19: mol_type = other RNA
gaaaagactgaactgcttt

SEQ ID NO: 1635 - RNA, 19 nt, synthetic construct
  source 1..19: mol_type = other RNA
cgaaaagactgaactgctt

SEQ ID NO: 1636 - RNA, 19 nt, synthetic construct
  source 1..19: mol_type = other RNA
ccgaaaagactgaactgct

SEQ ID NO: 1637 - RNA, 19 nt, synthetic construct
  source 1..19: mol_type = other RNA
accgaaaagactgaactgc

SEQ ID NO: 1638 - RNA, 19 nt, synthetic construct
  source 1..19: mol_type = other RNA
taccgaaaagactgaactg

SEQ ID NO: 1639 - RNA, 19 nt, synthetic construct
  source 1..19: mol_type = other RNA
ataccgaaaagactgaact

SEQ ID NO: 1640 - RNA, 19 nt, synthetic construct
  source 1..19: mol_type = other RNA
cataccgaaaagactgaac

SEQ ID NO: 1641 - RNA, 19 nt, synthetic construct
  source 1..19: mol_type = other RNA
tcataccgaaaagactgaa

SEQ ID NO: 1642 - RNA, 19 nt, synthetic construct
  source 1..19: mol_type = other RNA
atcataccgaaaagactga

SEQ ID NO: 1643 - RNA, 19 nt, synthetic construct
  source 1..19: mol_type = other RNA
catcataccgaaaagactg

SEQ ID NO: 1644 - RNA, 19 nt, synthetic construct
  source 1..19: mol_type = other RNA
acatcataccgaaaagact

SEQ ID NO: 1645 - RNA, 19 nt, synthetic construct
  source 1..19: mol_type = other RNA
aacatcataccgaaaagac

SEQ ID NO: 1646 - RNA, 19 nt, synthetic construct
  source 1..19: mol_type = other RNA
caacatcataccgaaaaga

SEQ ID NO: 1647 - RNA, 19 nt, synthetic construct
  source 1..19: mol_type = other RNA
acaacatcataccgaaaag

SEQ ID NO: 1648 - RNA, 19 nt, synthetic construct
  source 1..19: mol_type = other RNA
gacaacatcataccgaaaa

SEQ ID NO: 1649 - RNA, 19 nt, synthetic construct
  source 1..19: mol_type = other RNA
ggacaacatcataccgaaa

SEQ ID NO: 1650 - RNA, 19 nt, synthetic construct
  source 1..19: mol_type = other RNA
aggacaacatcataccgaa

SEQ ID NO: 1651 - RNA, 19 nt, synthetic construct
  source 1..19: mol_type = other RNA
caggacaacatcataccga

SEQ ID NO: 1652 - RNA, 19 nt, synthetic construct
  source 1..19: mol_type = other RNA
tcaggacaacatcataccg

SEQ ID NO: 1653 - RNA, 19 nt, synthetic construct
  source 1..19: mol_type = other RNA
ttcaggacaacatcatacc

SEQ ID NO: 1654 - RNA, 19 nt, synthetic construct
  source 1..19: mol_type = other RNA
cttcaggacaacatcatac

SEQ ID NO: 1655 - RNA, 19 nt, synthetic construct
  source 1..19: mol_type = other RNA
tcttcaggacaacatcata

SEQ ID NO: 1656 - RNA, 19 nt, synthetic construct
  source 1..19: mol_type = other RNA
gtcttcaggacaacatcat

SEQ ID NO: 1657 - RNA, 19 nt, synthetic construct
  source 1..19: mol_type = other RNA
cgtcttcaggacaacatca

SEQ ID NO: 1658 - RNA, 19 nt, synthetic construct
  source 1..19: mol_type = other RNA
ccgtcttcaggacaacatc

SEQ ID NO: 1659 - RNA, 19 nt, synthetic construct
  source 1..19: mol_type = other RNA
cccgtcttcaggacaacat

SEQ ID NO: 1660 - RNA, 19 nt, synthetic construct
  source 1..19: mol_type = other RNA
ccccgtcttcaggacaaca

SEQ ID NO: 1661 - RNA, 19 nt, synthetic construct
  source 1..19: mol_type = other RNA
gccccgtcttcaggacaac

SEQ ID NO: 1662 - RNA, 19 nt, synthetic construct
  source 1..19: mol_type = other RNA
agccccgtcttcaggacaa

SEQ ID NO: 1663 - RNA, 19 nt, synthetic construct
  source 1..19: mol_type = other RNA
tagccccgtcttcaggaca

SEQ ID NO: 1664 - RNA, 19 nt, synthetic construct
  source 1..19: mol_type = other RNA
ctagccccgtcttcaggac

SEQ ID NO: 1665 - RNA, 19 nt, synthetic construct
  source 1..19: mol_type = other RNA
tctagccccgtcttcagga

SEQ ID NO: 1666 - RNA, 19 nt, synthetic construct
  source 1..19: mol_type = other RNA
atctagccccgtcttcagg

SEQ ID NO: 1667 - RNA, 19 nt, synthetic construct
  source 1..19: mol_type = other RNA
tatctagccccgtcttcag

SEQ ID NO: 1668 - RNA, 19 nt, synthetic construct
  source 1..19: mol_type = other RNA
atatctagccccgtcttca

SEQ ID NO: 1669 - RNA, 19 nt, synthetic construct
  source 1..19: mol_type = other RNA
aatatctagccccgtcttc

SEQ ID NO: 1670 - RNA, 19 nt, synthetic construct
  source 1..19: mol_type = other RNA
caatatctagccccgtctt

SEQ ID NO: 1671 - RNA, 19 nt, synthetic construct
  source 1..19: mol_type = other RNA
ccaatatctagccccgtct

SEQ ID NO: 1672 - RNA, 19 nt, synthetic construct
  source 1..19: mol_type = other RNA
cccaatatctagccccgtc

SEQ ID NO: 1673 - RNA, 19 nt, synthetic construct
  source 1..19: mol_type = other RNA
tcccaatatctagccccgt

SEQ ID NO: 1674 - RNA, 19 nt, synthetic construct
  source 1..19: mol_type = other RNA
ctcccaatatctagccccg

SEQ ID NO: 1675 - RNA, 19 nt, synthetic construct
  source 1..19: mol_type = other RNA
tctcccaatatctagcccc

SEQ ID NO: 1676 - RNA, 19 nt, synthetic construct
  source 1..19: mol_type = other RNA
ttctcccaatatctagccc

SEQ ID NO: 1677 - RNA, 19 nt, synthetic construct
  source 1..19: mol_type = other RNA
tttctcccaatatctagcc

SEQ ID NO: 1678 - RNA, 19 nt, synthetic construct
  source 1..19: mol_type = other RNA
gtttctcccaatatctagc

SEQ ID NO: 1679 - RNA, 19 nt, synthetic construct
  source 1..19: mol_type = other RNA
tgtttctcccaatatctag

SEQ ID NO: 1680 - RNA, 19 nt, synthetic construct
  source 1..19: mol_type = other RNA
ttgtttctcccaatatcta

SEQ ID NO: 1681 - RNA, 19 nt, synthetic construct
  source 1..19: mol_type = other RNA
tttgtttctcccaatatct

SEQ ID NO: 1682 - RNA, 19 nt, synthetic construct
  source 1..19: mol_type = other RNA
ctttgtttctcccaatatc

SEQ ID NO: 1683 - RNA, 19 nt, synthetic construct
  source 1..19: mol_type = other RNA
actttgtttctcccaatat

SEQ ID NO: 1684 - RNA, 19 nt, synthetic construct
  source 1..19: mol_type = other RNA
cactttgtttctcccaata

SEQ ID NO: 1685 - RNA, 19 nt, synthetic construct
  source 1..19: mol_type = other RNA
ccactttgtttctcccaat

SEQ ID NO: 1686 - RNA, 19 nt, synthetic construct
  source 1..19: mol_type = other RNA
tccactttgtttctcccaa

SEQ ID NO: 1687 - RNA, 19 nt, synthetic construct
  source 1..19: mol_type = other RNA
ttccactttgtttctccca

SEQ ID NO: 1688 - RNA, 19 nt, synthetic construct
  source 1..19: mol_type = other RNA
cttccactttgtttctccc

SEQ ID NO: 1689 - RNA, 19 nt, synthetic construct
  source 1..19: mol_type = other RNA
tcttccactttgtttctcc

SEQ ID NO: 1690 - RNA, 19 nt, synthetic construct
  source 1..19: mol_type = other RNA
atcttccactttgtttctc

SEQ ID NO: 1691 - RNA, 19 nt, synthetic construct
  source 1..19: mol_type = other RNA
catcttccactttgtttct

SEQ ID NO: 1692 - RNA, 19 nt, synthetic construct
  source 1..19: mol_type = other RNA
gcatcttccactttgtttc

SEQ ID NO: 1693 - RNA, 19 nt, synthetic construct
  source 1..19: mol_type = other RNA
agcatcttccactttgttt

SEQ ID NO: 1694 - RNA, 19 nt, synthetic construct
  source 1..19: mol_type = other RNA
aagcatcttccactttgtt

SEQ ID NO: 1695 - RNA, 19 nt, synthetic construct
  source 1..19: mol_type = other RNA
aaagcatcttccactttgt

SEQ ID NO: 1696 - RNA, 19 nt, synthetic construct
  source 1..19: mol_type = other RNA
gaaagcatcttccactttg

SEQ ID NO: 1697 - RNA, 19 nt, synthetic construct
  source 1..19: mol_type = other RNA
agaaagcatcttccacttt

SEQ ID NO: 1698 - RNA, 19 nt, synthetic construct
  source 1..19: mol_type = other RNA
tagaaagcatcttccactt

SEQ ID NO: 1699 - RNA, 19 nt, synthetic construct
  source 1..19: mol_type = other RNA
gtagaaagcatcttccact

SEQ ID NO: 1700 - RNA, 19 nt, synthetic construct
  source 1..19: mol_type = other RNA
tgtagaaagcatcttccac

SEQ ID NO: 1701 - RNA, 19 nt, synthetic construct
  source 1..19: mol_type = other RNA
ttgtagaaagcatcttcca

SEQ ID NO: 1702 - RNA, 19 nt, synthetic construct
  source 1..19: mol_type = other RNA
tttgtagaaagcatcttcc

SEQ ID NO: 1703 - RNA, 19 nt, synthetic construct
  source 1..19: mol_type = other RNA
ctttgtagaaagcatcttc

SEQ ID NO: 1704 - RNA, 19 nt, synthetic construct
  source 1..19: mol_type = other RNA
cctttgtagaaagcatctt

SEQ ID NO: 1705 - RNA, 19 nt, synthetic construct
  source 1..19: mol_type = other RNA
acctttgtagaaagcatct

SEQ ID NO: 1706 - RNA, 19 nt, synthetic construct
  source 1..19: mol_type = other RNA
cacctttgtagaaagcatc

SEQ ID NO: 1707 - RNA, 19 nt, synthetic construct
  source 1..19: mol_type = other RNA
tcacctttgtagaaagcat

SEQ ID NO: 1708 - RNA, 19 nt, synthetic construct
  source 1..19: mol_type = other RNA
ttcacctttgtagaaagca

SEQ ID NO: 1709 - RNA, 19 nt, synthetic construct
  source 1..19: mol_type = other RNA
gttcacctttgtagaaagc

SEQ ID NO: 1710 - RNA, 19 nt, synthetic construct
  source 1..19: mol_type = other RNA
agttcacctttgtagaaag

SEQ ID NO: 1711 - RNA, 19 nt, synthetic construct
  source 1..19: mol_type = other RNA
gagttcacctttgtagaaa

SEQ ID NO: 1712 - RNA, 19 nt, synthetic construct
  source 1..19: mol_type = other RNA
tgagttcacctttgtagaa

SEQ ID NO: 1713 - RNA, 19 nt, synthetic construct
  source 1..19: mol_type = other RNA
ctgagttcacctttgtaga

SEQ ID NO: 1714 - RNA, 19 nt, synthetic construct
  source 1..19: mol_type = other RNA
cctgagttcacctttgtag

SEQ ID NO: 1715 - RNA, 19 nt, synthetic construct
  source 1..19: mol_type = other RNA
gcctgagttcacctttgta

SEQ ID NO: 1716 - RNA, 19 nt, synthetic construct
  source 1..19: mol_type = other RNA
agcctgagttcacctttgt

SEQ ID NO: 1717 - RNA, 19 nt, synthetic construct
  source 1..19: mol_type = other RNA
cagcctgagttcacctttg

SEQ ID NO: 1718 - RNA, 19 nt, synthetic construct
  source 1..19: mol_type = other RNA
tcagcctgagttcaccttt

SEQ ID NO: 1719 - RNA, 19 nt, synthetic construct
  source 1..19: mol_type = other RNA
ttcagcctgagttcacctt

SEQ ID NO: 1720 - RNA, 19 nt, synthetic construct
  source 1..19: mol_type = other RNA
attcagcctgagttcacct

SEQ ID NO: 1721 - RNA, 19 nt, synthetic construct
  source 1..19: mol_type = other RNA
cattcagcctgagttcacc

SEQ ID NO: 1722 - RNA, 19 nt, synthetic construct
  source 1..19: mol_type = other RNA
tcattcagcctgagttcac

SEQ ID NO: 1723 - RNA, 19 nt, synthetic construct
  source 1..19: mol_type = other RNA
ctcattcagcctgagttca

SEQ ID NO: 1724 - RNA, 19 nt, synthetic construct
  source 1..19: mol_type = other RNA
cctcattcagcctgagttc

SEQ ID NO: 1725 - RNA, 19 nt, synthetic construct
  source 1..19: mol_type = other RNA
tcctcattcagcctgagtt

SEQ ID NO: 1726 - RNA, 19 nt, synthetic construct
  source 1..19: mol_type = other RNA
ttcctcattcagcctgagt

SEQ ID NO: 1727 - RNA, 19 nt, synthetic construct
  source 1..19: mol_type = other RNA
tttcctcattcagcctgag

SEQ ID NO: 1728 - RNA, 19 nt, synthetic construct
  source 1..19: mol_type = other RNA
ttttcctcattcagcctga

SEQ ID NO: 1729 - RNA, 19 nt, synthetic construct
  source 1..19: mol_type = other RNA
tttttcctcattcagcctg

SEQ ID NO: 1730 - RNA, 19 nt, synthetic construct
  source 1..19: mol_type = other RNA
atttttcctcattcagcct

SEQ ID NO: 1731 - RNA, 19 nt, synthetic construct
  source 1..19: mol_type = other RNA
aatttttcctcattcagcc

SEQ ID NO: 1732 - RNA, 19 nt, synthetic construct
  source 1..19: mol_type = other RNA
taatttttcctcattcagc

SEQ ID NO: 1733 - RNA, 19 nt, synthetic construct
  source 1..19: mol_type = other RNA
ataatttttcctcattcag

SEQ ID NO: 1734 - RNA, 19 nt, synthetic construct
  source 1..19: mol_type = other RNA
cataatttttcctcattca

SEQ ID NO: 1735 - RNA, 19 nt, synthetic construct
  source 1..19: mol_type = other RNA
ccataatttttcctcattc

SEQ ID NO: 1736 - RNA, 19 nt, synthetic construct
  source 1..19: mol_type = other RNA
tccataatttttcctcatt

SEQ ID NO: 1737 - RNA, 19 nt, synthetic construct
  source 1..19: mol_type = other RNA
ttccataatttttcctcat

SEQ ID NO: 1738 - RNA, 19 nt, synthetic construct
  source 1..19: mol_type = other RNA
cttccataatttttcctca

SEQ ID NO: 1739 - RNA, 19 nt, synthetic construct
  source 1..19: mol_type = other RNA
tcttccataatttttcctc

SEQ ID NO: 1740 - RNA, 19 nt, synthetic construct
  source 1..19: mol_type = other RNA
ttcttccataatttttcct

SEQ ID NO: 1741 - RNA, 19 nt, synthetic construct
  source 1..19: mol_type = other RNA
tttcttccataatttttcc

SEQ ID NO: 1742 - RNA, 19 nt, synthetic construct
  source 1..19: mol_type = other RNA
ttttcttccataatttttc

SEQ ID NO: 1743 - RNA, 19 nt, synthetic construct
  source 1..19: mol_type = other RNA
cttttcttccataattttt

SEQ ID NO: 1744 - RNA, 19 nt, synthetic construct
  source 1..19: mol_type = other RNA
gcttttcttccataatttt

SEQ ID NO: 1745 - RNA, 19 nt, synthetic construct
  source 1..19: mol_type = other RNA
tgcttttcttccataattt

SEQ ID NO: 1746 - RNA, 19 nt, synthetic construct
  source 1..19: mol_type = other RNA
ctgcttttcttccataatt

SEQ ID NO: 1747 - RNA, 19 nt, synthetic construct
  source 1..19: mol_type = other RNA
tctgcttttcttccataat

SEQ ID NO: 1748 - RNA, 19 nt, synthetic construct
  source 1..19: mol_type = other RNA
ttctgcttttcttccataa

SEQ ID NO: 1749 - RNA, 19 nt, synthetic construct
  source 1..19: mol_type = other RNA
gttctgcttttcttccata

SEQ ID NO: 1750 - RNA, 19 nt, synthetic construct
  source 1..19: mol_type = other RNA
cgttctgcttttcttccat

SEQ ID NO: 1751 - RNA, 19 nt, synthetic construct
  source 1..19: mol_type = other RNA
ccgttctgcttttcttcca

SEQ ID NO: 1752 - RNA, 19 nt, synthetic construct
  source 1..19: mol_type = other RNA
accgttctgcttttcttcc

SEQ ID NO: 1753 - RNA, 19 nt, synthetic construct
  source 1..19: mol_type = other RNA
caccgttctgcttttcttc

SEQ ID NO: 1754 - RNA, 19 nt, synthetic construct
  source 1..19: mol_type = other RNA
tcaccgttctgcttttctt

SEQ ID NO: 1755 - RNA, 19 nt, synthetic construct
  source 1..19: mol_type = other RNA
ttcaccgttctgcttttct

SEQ ID NO: 1756 - RNA, 19 nt, synthetic construct
  source 1..19: mol_type = other RNA
tttcaccgttctgcttttc

SEQ ID NO: 1757 - RNA, 19 nt, synthetic construct
  source 1..19: mol_type = other RNA
ctttcaccgttctgctttt

SEQ ID NO: 1758 - RNA, 19 nt, synthetic construct
  source 1..19: mol_type = other RNA
actttcaccgttctgcttt

SEQ ID NO: 1759 - RNA, 19 nt, synthetic construct
  source 1..19: mol_type = other RNA
cactttcaccgttctgctt

SEQ ID NO: 1760 - RNA, 19 nt, synthetic construct
  source 1..19: mol_type = other RNA
ccactttcaccgttctgct

SEQ ID NO: 1761 - RNA, 19 nt, synthetic construct
  source 1..19: mol_type = other RNA
cccactttcaccgttctgc

SEQ ID NO: 1762 - RNA, 19 nt, synthetic construct
  source 1..19: mol_type = other RNA
tcccactttcaccgttctg

SEQ ID NO: 1763 - RNA, 19 nt, synthetic construct
  source 1..19: mol_type = other RNA
ctcccactttcaccgttct

SEQ ID NO: 1764 - RNA, 19 nt, synthetic construct
  source 1..19: mol_type = other RNA
tctcccactttcaccgttc

SEQ ID NO: 1765 - RNA, 19 nt, synthetic construct
  source 1..19: mol_type = other RNA
atctcccactttcaccgtt

SEQ ID NO: 1766 - RNA, 19 nt, synthetic construct
  source 1..19: mol_type = other RNA
tatctcccactttcaccgt

SEQ ID NO: 1767 - RNA, 19 nt, synthetic construct
  source 1..19: mol_type = other RNA
gtatctcccactttcaccg

SEQ ID NO: 1768 - RNA, 19 nt, synthetic construct
  source 1..19: mol_type = other RNA
tgtatctcccactttcacc

SEQ ID NO: 1769 - RNA, 19 nt, synthetic construct
  source 1..19: mol_type = other RNA
atgtatctcccactttcac

SEQ ID NO: 1770 - RNA, 19 nt, synthetic construct
  source 1..19: mol_type = other RNA
aatgtatctcccactttca

SEQ ID NO: 1771 - RNA, 19 nt, synthetic construct
  source 1..19: mol_type = other RNA
caatgtatctcccactttc

SEQ ID NO: 1772 - RNA, 19 nt, synthetic construct
  source 1..19: mol_type = other RNA
ccaatgtatctcccacttt

SEQ ID NO: 1773 - RNA, 19 nt, synthetic construct
  source 1..19: mol_type = other RNA
tccaatgtatctcccactt

SEQ ID NO: 1774 - RNA, 19 nt, synthetic construct
  source 1..19: mol_type = other RNA
atccaatgtatctcccact

SEQ ID NO: 1775 - RNA, 19 nt, synthetic construct
  source 1..19: mol_type = other RNA
gatccaatgtatctcccac

SEQ ID NO: 1776 - RNA, 19 nt, synthetic construct
  source 1..19: mol_type = other RNA
agatccaatgtatctccca

SEQ ID NO: 1777 - RNA, 19 nt, synthetic construct
  source 1..19: mol_type = other RNA
aagatccaatgtatctccc

SEQ ID NO: 1778 - RNA, 19 nt, synthetic construct
  source 1..19: mol_type = other RNA
gaagatccaatgtatctcc

SEQ ID NO: 1779 - RNA, 19 nt, synthetic construct
  source 1..19: mol_type = other RNA
agaagatccaatgtatctc

SEQ ID NO: 1780 - RNA, 19 nt, synthetic construct
  source 1..19: mol_type = other RNA
gagaagatccaatgtatct

SEQ ID NO: 1781 - RNA, 19 nt, synthetic construct
  source 1..19: mol_type = other RNA
tgagaagatccaatgtatc

SEQ ID NO: 1782 - RNA, 19 nt, synthetic construct
  source 1..19: mol_type = other RNA
atgagaagatccaatgtat

SEQ ID NO: 1783 - RNA, 19 nt, synthetic construct
  source 1..19: mol_type = other RNA
aatgagaagatccaatgta

SEQ ID NO: 1784 - RNA, 19 nt, synthetic construct
  source 1..19: mol_type = other RNA
caatgagaagatccaatgt

SEQ ID NO: 1785 - RNA, 19 nt, synthetic construct
  source 1..19: mol_type = other RNA
ccaatgagaagatccaatg

SEQ ID NO: 1786 - RNA, 19 nt, synthetic construct
  source 1..19: mol_type = other RNA
tccaatgagaagatccaat

SEQ ID NO: 1787 - RNA, 19 nt, synthetic construct
  source 1..19: mol_type = other RNA
ctccaatgagaagatccaa

SEQ ID NO: 1788 - RNA, 19 nt, synthetic construct
  source 1..19: mol_type = other RNA
tctccaatgagaagatcca

SEQ ID NO: 1789 - RNA, 19 nt, synthetic construct
  source 1..19: mol_type = other RNA
ctctccaatgagaagatcc

SEQ ID NO: 1790 - RNA, 19 nt, synthetic construct
  source 1..19: mol_type = other RNA
cctctccaatgagaagatc

SEQ ID NO: 1791 - RNA, 19 nt, synthetic construct
  source 1..19: mol_type = other RNA
tcctctccaatgagaagat

SEQ ID NO: 1792 - RNA, 19 nt, synthetic construct
  source 1..19: mol_type = other RNA
atcctctccaatgagaaga

SEQ ID NO: 1793 - RNA, 19 nt, synthetic construct
  source 1..19: mol_type = other RNA
tatcctctccaatgagaag

SEQ ID NO: 1794 - RNA, 19 nt, synthetic construct
  source 1..19: mol_type = other RNA
ttatcctctccaatgagaa

SEQ ID NO: 1795 - RNA, 19 nt, synthetic construct
  source 1..19: mol_type = other RNA
tttatcctctccaatgaga

SEQ ID NO: 1796 - RNA, 19 nt, synthetic construct
  source 1..19: mol_type = other RNA
ctttatcctctccaatgag

SEQ ID NO: 1797 - RNA, 19 nt, synthetic construct
  source 1..19: mol_type = other RNA
tctttatcctctccaatga

SEQ ID NO: 1798 - RNA, 19 nt, synthetic construct
  source 1..19: mol_type = other RNA
ttctttatcctctccaatg

SEQ ID NO: 1799 - RNA, 19 nt, synthetic construct
  source 1..19: mol_type = other RNA
cttctttatcctctccaat

SEQ ID NO: 1800 - RNA, 19 nt, synthetic construct
  source 1..19: mol_type = other RNA
gcttctttatcctctccaa

SEQ ID NO: 1801 - RNA, 19 nt, synthetic construct
  source 1..19: mol_type = other RNA
tgcttctttatcctctcca

SEQ ID NO: 1802 - RNA, 19 nt, synthetic construct
  source 1..19: mol_type = other RNA
ctgcttctttatcctctcc

SEQ ID NO: 1803 - RNA, 19 nt, synthetic construct
  source 1..19: mol_type = other RNA
cctgcttctttatcctctc

SEQ ID NO: 1804 - RNA, 19 nt, synthetic construct
  source 1..19: mol_type = other RNA
tcctgcttctttatcctct

SEQ ID NO: 1805 - RNA, 19 nt, synthetic construct
  source 1..19: mol_type = other RNA
ttcctgcttctttatcctc

SEQ ID NO: 1806 - RNA, 19 nt, synthetic construct
  source 1..19: mol_type = other RNA
gttcctgcttctttatcct

SEQ ID NO: 1807 - RNA, 19 nt, synthetic construct
  source 1..19: mol_type = other RNA
tgttcctgcttctttatcc

SEQ ID NO: 1808 - RNA, 19 nt, synthetic construct
  source 1..19: mol_type = other RNA
ctgttcctgcttctttatc

SEQ ID NO: 1809 - RNA, 19 nt, synthetic construct
  source 1..19: mol_type = other RNA
tctgttcctgcttctttat

SEQ ID NO: 1810 - RNA, 19 nt, synthetic construct
  source 1..19: mol_type = other RNA
ctctgttcctgcttcttta

SEQ ID NO: 1811 - RNA, 19 nt, synthetic construct
  source 1..19: mol_type = other RNA
tctctgttcctgcttcttt

SEQ ID NO: 1812 - RNA, 19 nt, synthetic construct
  source 1..19: mol_type = other RNA
gtctctgttcctgcttctt

SEQ ID NO: 1813 - RNA, 19 nt, synthetic construct
  source 1..19: mol_type = other RNA
tgtctctgttcctgcttct

SEQ ID NO: 1814 - RNA, 19 nt, synthetic construct
  source 1..19: mol_type = other RNA
ctgtctctgttcctgcttc

SEQ ID NO: 1815 - RNA, 19 nt, synthetic construct
  source 1..19: mol_type = other RNA
actgtctctgttcctgctt

SEQ ID NO: 1816 - RNA, 19 nt, synthetic construct
  source 1..19: mol_type = other RNA
aactgtctctgttcctgct

SEQ ID NO: 1817 - RNA, 19 nt, synthetic construct
  source 1..19: mol_type = other RNA
taactgtctctgttcctgc

SEQ ID NO: 1818 - RNA, 19 nt, synthetic construct
  source 1..19: mol_type = other RNA
ataactgtctctgttcctg

SEQ ID NO: 1819 - RNA, 19 nt, synthetic construct
  source 1..19: mol_type = other RNA
cataactgtctctgttcct

SEQ ID NO: 1820 - RNA, 19 nt, synthetic construct
  source 1..19: mol_type = other RNA
gcataactgtctctgttcc

SEQ ID NO: 1821 - RNA, 19 nt, synthetic construct
  source 1..19: mol_type = other RNA
cgcataactgtctctgttc

SEQ ID NO: 1822 - RNA, 19 nt, synthetic construct
  source 1..19: mol_type = other RNA
ccgcataactgtctctgtt

SEQ ID NO: 1823 - RNA, 19 nt, synthetic construct
  source 1..19: mol_type = other RNA
tccgcataactgtctctgt

SEQ ID NO: 1824 - RNA, 19 nt, synthetic construct
  source 1..19: mol_type = other RNA
atccgcataactgtctctg

SEQ ID NO: 1825 - RNA, 19 nt, synthetic construct
  source 1..19: mol_type = other RNA
aatccgcataactgtctct

SEQ ID NO: 1826 - RNA, 19 nt, synthetic construct
  source 1..19: mol_type = other RNA
gaatccgcataactgtctc

SEQ ID NO: 1827 - RNA, 19 nt, synthetic construct
  source 1..19: mol_type = other RNA
agaatccgcataactgtct

SEQ ID NO: 1828 - RNA, 19 nt, synthetic construct
  source 1..19: mol_type = other RNA
gagaatccgcataactgtc

SEQ ID NO: 1829 - RNA, 19 nt, synthetic construct
  source 1..19: mol_type = other RNA
agagaatccgcataactgt

SEQ ID NO: 1830 - RNA, 19 nt, synthetic construct
  source 1..19: mol_type = other RNA
aagagaatccgcataactg

SEQ ID NO: 1831 - RNA, 19 nt, synthetic construct
  source 1..19: mol_type = other RNA
caagagaatccgcataact

SEQ ID NO: 1832 - RNA, 19 nt, synthetic construct
  source 1..19: mol_type = other RNA
tcaagagaatccgcataac

SEQ ID NO: 1833 - RNA, 19 nt, synthetic construct
  source 1..19: mol_type = other RNA
ttcaagagaatccgcataa

SEQ ID NO: 1834 - RNA, 19 nt, synthetic construct
  source 1..19: mol_type = other RNA
tttcaagagaatccgcata

SEQ ID NO: 1835 - RNA, 19 nt, synthetic construct
  source 1..19: mol_type = other RNA
ttttcaagagaatccgcat

SEQ ID NO: 1836 - RNA, 19 nt, synthetic construct
  source 1..19: mol_type = other RNA
tttttcaagagaatccgca

SEQ ID NO: 1837 - RNA, 19 nt, synthetic construct
  source 1..19: mol_type = other RNA
ttttttcaagagaatccgc

SEQ ID NO: 1838 - RNA, 19 nt, synthetic construct
  source 1..19: mol_type = other RNA
cttttttcaagagaatccg

SEQ ID NO: 1839 - RNA, 19 nt, synthetic construct
  source 1..19: mol_type = other RNA
acttttttcaagagaatcc

SEQ ID NO: 1840 - RNA, 19 nt, synthetic construct
  source 1..19: mol_type = other RNA
cacttttttcaagagaatc

SEQ ID NO: 1841 - RNA, 19 nt, synthetic construct
  source 1..19: mol_type = other RNA
acacttttttcaagagaat

SEQ ID NO: 1842 - RNA, 19 nt, synthetic construct
  source 1..19: mol_type = other RNA
aacacttttttcaagagaa

SEQ ID NO: 1843 - RNA, 19 nt, synthetic construct
  source 1..19: mol_type = other RNA
aaacacttttttcaagaga

SEQ ID NO: 1844 - RNA, 19 nt, synthetic construct
  source 1..19: mol_type = other RNA
caaacacttttttcaagag

SEQ ID NO: 1845 - RNA, 19 nt, synthetic construct
  source 1..19: mol_type = other RNA
tcaaacacttttttcaaga

SEQ ID NO: 1846 - RNA, 19 nt, synthetic construct
  source 1..19: mol_type = other RNA
ttcaaacacttttttcaag

SEQ ID NO: 1847 - RNA, 19 nt, synthetic construct
  source 1..19: mol_type = other RNA
cttcaaacacttttttcaa

SEQ ID NO: 1848 - RNA, 19 nt, synthetic construct
  source 1..19: mol_type = other RNA
tcttcaaacacttttttca

SEQ ID NO: 1849 - RNA, 19 nt, synthetic construct
  source 1..19: mol_type = other RNA
ctcttcaaacacttttttc

SEQ ID NO: 1850 - RNA, 19 nt, synthetic construct
  source 1..19: mol_type = other RNA
tctcttcaaacactttttt

SEQ ID NO: 1851 - RNA, 19 nt, synthetic construct
  source 1..19: mol_type = other RNA
ttctcttcaaacacttttt

SEQ ID NO: 1852 - RNA, 19 nt, synthetic construct
  source 1..19: mol_type = other RNA
cttctcttcaaacactttt

SEQ ID NO: 1853 - RNA, 19 nt, synthetic construct
  source 1..19: mol_type = other RNA
tcttctcttcaaacacttt

SEQ ID NO: 1854 - RNA, 19 nt, synthetic construct
  source 1..19: mol_type = other RNA
gtcttctcttcaaacactt

SEQ ID NO: 1855 - RNA, 19 nt, synthetic construct
  source 1..19: mol_type = other RNA
agtcttctcttcaaacact

SEQ ID NO: 1856 - RNA, 19 nt, synthetic construct
  source 1..19: mol_type = other RNA
cagtcttctcttcaaacac

SEQ ID NO: 1857 - RNA, 19 nt, synthetic construct
  source 1..19: mol_type = other RNA
tcagtcttctcttcaaaca

SEQ ID NO: 1858 - RNA, 19 nt, synthetic construct
  source 1..19: mol_type = other RNA
ttcagtcttctcttcaaac

SEQ ID NO: 1859 - RNA, 19 nt, synthetic construct
  source 1..19: mol_type = other RNA
tttcagtcttctcttcaaa

SEQ ID NO: 1860 - RNA, 19 nt, synthetic construct
  source 1..19: mol_type = other RNA
ctttcagtcttctcttcaa

SEQ ID NO: 1861 - RNA, 19 nt, synthetic construct
  source 1..19: mol_type = other RNA
actttcagtcttctcttca

SEQ ID NO: 1862 - RNA, 19 nt, synthetic construct
  source 1..19: mol_type = other RNA
cactttcagtcttctcttc

SEQ ID NO: 1863 - RNA, 19 nt, synthetic construct
  source 1..19: mol_type = other RNA
tcactttcagtcttctctt

SEQ ID NO: 1864 - RNA, 19 nt, synthetic construct
  source 1..19: mol_type = other RNA
ttcactttcagtcttctct

SEQ ID NO: 1865 - RNA, 19 nt, synthetic construct
  source 1..19: mol_type = other RNA
tttcactttcagtcttctc

SEQ ID NO: 1866 - RNA, 19 nt, synthetic construct
  source 1..19: mol_type = other RNA
ttttcactttcagtcttct

SEQ ID NO: 1867 - RNA, 19 nt, synthetic construct
  source 1..19: mol_type = other RNA
tttttcactttcagtcttc

SEQ ID NO: 1868 - RNA, 19 nt, synthetic construct
  source 1..19: mol_type = other RNA
atttttcactttcagtctt

SEQ ID NO: 1869 - RNA, 19 nt, synthetic construct
  source 1..19: mol_type = other RNA
tatttttcactttcagtct

SEQ ID NO: 1870 - RNA, 19 nt, synthetic construct
  source 1..19: mol_type = other RNA
gtatttttcactttcagtc

SEQ ID NO: 1871 - RNA, 19 nt, synthetic construct
  source 1..19: mol_type = other RNA
tgtatttttcactttcagt

SEQ ID NO: 1872 - RNA, 19 nt, synthetic construct
  source 1..19: mol_type = other RNA
ctgtatttttcactttcag

SEQ ID NO: 1873 - RNA, 19 nt, synthetic construct
  source 1..19: mol_type = other RNA
tctgtatttttcactttca

SEQ ID NO: 1874 - RNA, 19 nt, synthetic construct
  source 1..19: mol_type = other RNA
ctctgtatttttcactttc

SEQ ID NO: 1875 - RNA, 19 nt, synthetic construct
  source 1..19: mol_type = other RNA
actctgtatttttcacttt

SEQ ID NO: 1876 - RNA, 19 nt, synthetic construct
  source 1..19: mol_type = other RNA
cactctgtatttttcactt

SEQ ID NO: 1877 - RNA, 19 nt, synthetic construct
  source 1..19: mol_type = other RNA
ccactctgtatttttcact

SEQ ID NO: 1878 - RNA, 19 nt, synthetic construct
  source 1..19: mol_type = other RNA
accactctgtatttttcac

SEQ ID NO: 1879 - RNA, 19 nt, synthetic construct
  source 1..19: mol_type = other RNA
caccactctgtatttttca

SEQ ID NO: 1880 - RNA, 19 nt, synthetic construct
  source 1..19: mol_type = other RNA
acaccactctgtatttttc

SEQ ID NO: 1881 - RNA, 19 nt, synthetic construct
  source 1..19: mol_type = other RNA
aacaccactctgtattttt

SEQ ID NO: 1882 - RNA, 19 nt, synthetic construct
  source 1..19: mol_type = other RNA
taacaccactctgtatttt

SEQ ID NO: 1883 - RNA, 19 nt, synthetic construct
  source 1..19: mol_type = other RNA
gtaacaccactctgtattt

SEQ ID NO: 1884 - RNA, 19 nt, synthetic construct
  source 1..19: mol_type = other RNA
cgtaacaccactctgtatt

SEQ ID NO: 1885 - RNA, 19 nt, synthetic construct
  source 1..19: mol_type = other RNA
ccgtaacaccactctgtat

SEQ ID NO: 1886 - RNA, 19 nt, synthetic construct
  source 1..19: mol_type = other RNA
gccgtaacaccactctgta

SEQ ID NO: 1887 - RNA, 19 nt, synthetic construct
  source 1..19: mol_type = other RNA
cgccgtaacaccactctgt

SEQ ID NO: 1888 - RNA, 19 nt, synthetic construct
  source 1..19: mol_type = other RNA
ccgccgtaacaccactctg

SEQ ID NO: 1889 - RNA, 19 nt, synthetic construct
  source 1..19: mol_type = other RNA
accgccgtaacaccactct

SEQ ID NO: 1890 - RNA, 19 nt, synthetic construct
  source 1..19: mol_type = other RNA
caccgccgtaacaccactc

SEQ ID NO: 1891 - RNA, 19 nt, synthetic construct
  source 1..19: mol_type = other RNA
ccaccgccgtaacaccact

SEQ ID NO: 1892 - RNA, 19 nt, synthetic construct
  source 1..19: mol_type = other RNA
tccaccgccgtaacaccac

SEQ ID NO: 1893 - RNA, 19 nt, synthetic construct
  source 1..19: mol_type = other RNA
ttccaccgccgtaacacca

SEQ ID NO: 1894 - RNA, 19 nt, synthetic construct
  source 1..19: mol_type = other RNA
tttccaccgccgtaacacc

SEQ ID NO: 1895 - RNA, 19 nt, synthetic construct
  source 1..19: mol_type = other RNA
ttttccaccgccgtaacac

SEQ ID NO: 1896 - RNA, 19 nt, synthetic construct
  source 1..19: mol_type = other RNA
cttttccaccgccgtaaca

SEQ ID NO: 1897 - RNA, 19 nt, synthetic construct
  source 1..19: mol_type = other RNA
acttttccaccgccgtaac

SEQ ID NO: 1898 - RNA, 19 nt, synthetic construct
  source 1..19: mol_type = other RNA
aacttttccaccgccgtaa

SEQ ID NO: 1899 - RNA, 19 nt, synthetic construct
  source 1..19: mol_type = other RNA
aaacttttccaccgccgta

SEQ ID NO: 1900 - RNA, 19 nt, synthetic construct
  source 1..19: mol_type = other RNA
taaacttttccaccgccgt

SEQ ID NO: 1901 - RNA, 19 nt, synthetic construct
  source 1..19: mol_type = other RNA
ttaaacttttccaccgccg

SEQ ID NO: 1902 - RNA, 19 nt, synthetic construct
  source 1..19: mol_type = other RNA
tttaaacttttccaccgcc

SEQ ID NO: 1903 - RNA, 19 nt, synthetic construct
  source 1..19: mol_type = other RNA
ctttaaacttttccaccgc

SEQ ID NO: 1904 - RNA, 19 nt, synthetic construct
  source 1..19: mol_type = other RNA
actttaaacttttccaccg

SEQ ID NO: 1905 - RNA, 19 nt, synthetic construct
  source 1..19: mol_type = other RNA
aactttaaacttttccacc

SEQ ID NO: 1906 - RNA, 19 nt, synthetic construct
  source 1..19: mol_type = other RNA
caactttaaacttttccac

SEQ ID NO: 1907 - RNA, 19 nt, synthetic construct
  source 1..19: mol_type = other RNA
gcaactttaaacttttcca

SEQ ID NO: 1908 - RNA, 19 nt, synthetic construct
  source 1..19: mol_type = other RNA
ggcaactttaaacttttcc

SEQ ID NO: 1909 - RNA, 19 nt, synthetic construct
  source 1..19: mol_type = other RNA
aggcaactttaaacttttc

SEQ ID NO: 1910 - RNA, 19 nt, synthetic construct
  source 1..19: mol_type = other RNA
taggcaactttaaactttt

SEQ ID NO: 1911 - RNA, 19 nt, synthetic construct
  source 1..19: mol_type = other RNA
ttaggcaactttaaacttt

SEQ ID NO: 1912 - RNA, 19 nt, synthetic construct
  source 1..19: mol_type = other RNA
cttaggcaactttaaactt

SEQ ID NO: 1913 - RNA, 19 nt, synthetic construct
  source 1..19: mol_type = other RNA
tcttaggcaactttaaact

SEQ ID NO: 1914 - RNA, 19 nt, synthetic construct
  source 1..19: mol_type = other RNA
ttcttaggcaactttaaac

SEQ ID NO: 1915 - RNA, 19 nt, synthetic construct
  source 1..19: mol_type = other RNA
cttcttaggcaactttaaa

SEQ ID NO: 1916 - RNA, 19 nt, synthetic construct
  source 1..19: mol_type = other RNA
tcttcttaggcaactttaa

SEQ ID NO: 1917 - RNA, 19 nt, synthetic construct
  source 1..19: mol_type = other RNA
ctcttcttaggcaacttta

SEQ ID NO: 1918 - RNA, 19 nt, synthetic construct
  source 1..19: mol_type = other RNA
tctcttcttaggcaacttt

SEQ ID NO: 1919 - RNA, 19 nt, synthetic construct
  source 1..19: mol_type = other RNA
ttctcttcttaggcaactt

SEQ ID NO: 1920 - RNA, 19 nt, synthetic construct
  source 1..19: mol_type = other RNA
attctcttcttaggcaact

SEQ ID NO: 1921 - RNA, 19 nt, synthetic construct
  source 1..19: mol_type = other RNA
cattctcttcttaggcaac

SEQ ID NO: 1922 - RNA, 19 nt, synthetic construct
  source 1..19: mol_type = other RNA
acattctcttcttaggcaa

SEQ ID NO: 1923 - RNA, 19 nt, synthetic construct
  source 1..19: mol_type = other RNA
gacattctcttcttaggca

SEQ ID NO: 1924 - RNA, 19 nt, synthetic construct
  source 1..19: mol_type = other RNA
agacattctcttcttaggc

SEQ ID NO: 1925 - RNA, 19 nt, synthetic construct
  source 1..19: mol_type = other RNA
tagacattctcttcttagg

SEQ ID NO: 1926 - RNA, 19 nt, synthetic construct
  source 1..19: mol_type = other RNA
ttagacattctcttcttag

SEQ ID NO: 1927 - RNA, 19 nt, synthetic construct
  source 1..19: mol_type = other RNA
tttagacattctcttctta

SEQ ID NO: 1928 - RNA, 19 nt, synthetic construct
  source 1..19: mol_type = other RNA
atttagacattctcttctt

SEQ ID NO: 1929 - RNA, 19 nt, synthetic construct
  source 1..19: mol_type = other RNA
tatttagacattctcttct

SEQ ID NO: 1930 - RNA, 19 nt, synthetic construct
  source 1..19: mol_type = other RNA
ttatttagacattctcttc

SEQ ID NO: 1931 - RNA, 19 nt, synthetic construct
  source 1..19: mol_type = other RNA
tttatttagacattctctt

SEQ ID NO: 1932 - RNA, 19 nt, synthetic construct
  source 1..19: mol_type = other RNA
atttatttagacattctct

SEQ ID NO: 1933 - RNA, 19 nt, synthetic construct
  source 1..19: mol_type = other RNA
catttatttagacattctc

SEQ ID NO: 1934 - RNA, 19 nt, synthetic construct
  source 1..19: mol_type = other RNA
ccatttatttagacattct

SEQ ID NO: 1935 - RNA, 19 nt, synthetic construct
  source 1..19: mol_type = other RNA
tccatttatttagacattc

SEQ ID NO: 1936 - RNA, 19 nt, synthetic construct
  source 1..19: mol_type = other RNA
atccatttatttagacatt

SEQ ID NO: 1937 - RNA, 19 nt, synthetic construct
  source 1..19: mol_type = other RNA
aatccatttatttagacat

SEQ ID NO: 1938 - RNA, 19 nt, synthetic construct
  source 1..19: mol_type = other RNA
caatccatttatttagaca

SEQ ID NO: 1939 - RNA, 19 nt, synthetic construct
  source 1..19: mol_type = other RNA
gcaatccatttatttagac

SEQ ID NO: 1940 - RNA, 19 nt, synthetic construct
  source 1..19: mol_type = other RNA
agcaatccatttatttaga

SEQ ID NO: 1941 - RNA, 19 nt, synthetic construct
  source 1..19: mol_type = other RNA
aagcaatccatttatttag

SEQ ID NO: 1942 - RNA, 19 nt, synthetic construct
  source 1..19: mol_type = other RNA
aaagcaatccatttattta

SEQ ID NO: 1943 - RNA, 19 nt, synthetic construct
  source 1..19: mol_type = other RNA
aaaagcaatccatttattt

SEQ ID NO: 1944 - RNA, 19 nt, synthetic construct
  source 1..19: mol_type = other RNA
aaaaagcaatccatttatt

SEQ ID NO: 1945 - RNA, 19 nt, synthetic construct
  source 1..19: mol_type = other RNA
taaaaagcaatccatttat

SEQ ID NO: 1946 - RNA, 19 nt, synthetic construct
  source 1..19: mol_type = other RNA
ctaaaaagcaatccattta

SEQ ID NO: 1947 - RNA, 19 nt, synthetic construct
  source 1..19: mol_type = other RNA
gctaaaaagcaatccattt

SEQ ID NO: 1948 - RNA, 19 nt, synthetic construct
  source 1..19: mol_type = other RNA
tgctaaaaagcaatccatt

SEQ ID NO: 1949 - RNA, 19 nt, synthetic construct
  source 1..19: mol_type = other RNA
ttgctaaaaagcaatccat

SEQ ID NO: 1950 - RNA, 19 nt, synthetic construct
  source 1..19: mol_type = other RNA
attgctaaaaagcaatcca

SEQ ID NO: 1951 - RNA, 19 nt, synthetic construct
  source 1..19: mol_type = other RNA
tattgctaaaaagcaatcc

SEQ ID NO: 1952 - RNA, 19 nt, synthetic construct
  source 1..19: mol_type = other RNA
ctattgctaaaaagcaatc

SEQ ID NO: 1953 - RNA, 19 nt, synthetic construct
  source 1..19: mol_type = other RNA
tctattgctaaaaagcaat

SEQ ID NO: 1954 - RNA, 19 nt, synthetic construct
  source 1..19: mol_type = other RNA
ctctattgctaaaaagcaa

SEQ ID NO: 1955 - RNA, 19 nt, synthetic construct
  source 1..19: mol_type = other RNA
gctctattgctaaaaagca

SEQ ID NO: 1956 - RNA, 19 nt, synthetic construct
  source 1..19: mol_type = other RNA
agctctattgctaaaaagc

SEQ ID NO: 1957 - RNA, 19 nt, synthetic construct
  source 1..19: mol_type = other RNA
cagctctattgctaaaaag

SEQ ID NO: 1958 - RNA, 19 nt, synthetic construct
  source 1..19: mol_type = other RNA
gcagctctattgctaaaaa

SEQ ID NO: 1959 - RNA, 19 nt, synthetic construct
  source 1..19: mol_type = other RNA
agcagctctattgctaaaa

SEQ ID NO: 1960 - RNA, 19 nt, synthetic construct
  source 1..19: mol_type = other RNA
aagcagctctattgctaaa

SEQ ID NO: 1961 - RNA, 19 nt, synthetic construct
  source 1..19: mol_type = other RNA
aaagcagctctattgctaa

SEQ ID NO: 1962 - RNA, 19 nt, synthetic construct
  source 1..19: mol_type = other RNA
gaaagcagctctattgcta

SEQ ID NO: 1963 - RNA, 19 nt, synthetic construct
  source 1..19: mol_type = other RNA
agaaagcagctctattgct

SEQ ID NO: 1964 - RNA, 19 nt, synthetic construct
  source 1..19: mol_type = other RNA
tagaaagcagctctattgc

SEQ ID NO: 1965 - RNA, 19 nt, synthetic construct
  source 1..19: mol_type = other RNA
ctagaaagcagctctattg

SEQ ID NO: 1966 - RNA, 19 nt, synthetic construct
  source 1..19: mol_type = other RNA
actagaaagcagctctatt

SEQ ID NO: 1967 - RNA, 19 nt, synthetic construct
  source 1..19: mol_type = other RNA
cactagaaagcagctctat

SEQ ID NO: 1968 - RNA, 19 nt, synthetic construct
  source 1..19: mol_type = other RNA
ccactagaaagcagctcta

SEQ ID NO: 1969 - RNA, 19 nt, synthetic construct
  source 1..19: mol_type = other RNA
accactagaaagcagctct

SEQ ID NO: 1970 - RNA, 19 nt, synthetic construct
  source 1..19: mol_type = other RNA
taccactagaaagcagctc

SEQ ID NO: 1971 - RNA, 19 nt, synthetic construct
  source 1..19: mol_type = other RNA
ttaccactagaaagcagct

SEQ ID NO: 1972 - RNA, 19 nt, synthetic construct
  source 1..19: mol_type = other RNA
tttaccactagaaagcagc

SEQ ID NO: 1973 - RNA, 19 nt, synthetic construct
  source 1..19: mol_type = other RNA
ctttaccactagaaagcag

SEQ ID NO: 1974 - RNA, 19 nt, synthetic construct
  source 1..19: mol_type = other RNA
cctttaccactagaaagca

SEQ ID NO: 1975 - RNA, 19 nt, synthetic construct
  source 1..19: mol_type = other RNA
tcctttaccactagaaagc

SEQ ID NO: 1976 - RNA, 19 nt, synthetic construct
  source 1..19: mol_type = other RNA
ttcctttaccactagaaag

SEQ ID NO: 1977 - RNA, 19 nt, synthetic construct
  source 1..19: mol_type = other RNA
cttcctttaccactagaaa

SEQ ID NO: 1978 - RNA, 19 nt, synthetic construct
  source 1..19: mol_type = other RNA
ccttcctttaccactagaa

SEQ ID NO: 1979 - RNA, 19 nt, synthetic construct
  source 1..19: mol_type = other RNA
cccttcctttaccactaga

SEQ ID NO: 1980 - RNA, 19 nt, synthetic construct
  source 1..19: mol_type = other RNA
ccccttcctttaccactag

SEQ ID NO: 1981 - RNA, 19 nt, synthetic construct
  source 1..19: mol_type = other RNA
accccttcctttaccacta

SEQ ID NO: 1982 - RNA, 19 nt, synthetic construct
  source 1..19: mol_type = other RNA
gaccccttcctttaccact

SEQ ID NO: 1983 - RNA, 19 nt, synthetic construct
  source 1..19: mol_type = other RNA
tgaccccttcctttaccac

SEQ ID NO: 1984 - RNA, 19 nt, synthetic construct
  source 1..19: mol_type = other RNA
gtgaccccttcctttacca

SEQ ID NO: 1985 - RNA, 19 nt, synthetic construct
  source 1..19: mol_type = other RNA
ggtgaccccttcctttacc

SEQ ID NO: 1986 - RNA, 19 nt, synthetic construct
  source 1..19: mol_type = other RNA
aggtgaccccttcctttac

SEQ ID NO: 1987 - RNA, 19 nt, synthetic construct
  source 1..19: mol_type = other RNA
caggtgaccccttccttta

SEQ ID NO: 1988 - RNA, 19 nt, synthetic construct
  source 1..19: mol_type = other RNA
tcaggtgaccccttccttt

SEQ ID NO: 1989 - RNA, 19 nt, synthetic construct
  source 1..19: mol_type = other RNA
ttcaggtgaccccttcctt

SEQ ID NO: 1990 - RNA, 19 nt, synthetic construct
  source 1..19: mol_type = other RNA
tttcaggtgaccccttcct

SEQ ID NO: 1991 - RNA, 19 nt, synthetic construct
  source 1..19: mol_type = other RNA
ttttcaggtgaccccttcc

SEQ ID NO: 1992 - RNA, 19 nt, synthetic construct
  source 1..19: mol_type = other RNA
tttttcaggtgaccccttc

SEQ ID NO: 1993 - RNA, 19 nt, synthetic construct
  source 1..19: mol_type = other RNA
atttttcaggtgacccctt

SEQ ID NO: 1994 - RNA, 19 nt, synthetic construct
  source 1..19: mol_type = other RNA
tatttttcaggtgacccct

SEQ ID NO: 1995 - RNA, 19 nt, synthetic construct
  source 1..19: mol_type = other RNA
ctatttttcaggtgacccc

SEQ ID NO: 1996 - RNA, 19 nt, synthetic construct
  source 1..19: mol_type = other RNA
cctatttttcaggtgaccc

SEQ ID NO: 1997 - RNA, 19 nt, synthetic construct
  source 1..19: mol_type = other RNA
tcctatttttcaggtgacc

SEQ ID NO: 1998 - RNA, 19 nt, synthetic construct
  source 1..19: mol_type = other RNA
gtcctatttttcaggtgac

SEQ ID NO: 1999 - RNA, 19 nt, synthetic construct
  source 1..19: mol_type = other RNA
tgtcctatttttcaggtga

SEQ ID NO: 2000 - RNA, 19 nt, synthetic construct
  source 1..19: mol_type = other RNA
atgtcctatttttcaggtg

SEQ ID NO: 2001 - RNA, 19 nt, synthetic construct
  source 1..19: mol_type = other RNA
aatgtcctatttttcaggt

SEQ ID NO: 2002 - RNA, 19 nt, synthetic construct
  source 1..19: mol_type = other RNA
aaatgtcctatttttcagg

SEQ ID NO: 2003 - RNA, 19 nt, synthetic construct
  source 1..19: mol_type = other RNA
aaaatgtcctatttttcag

SEQ ID NO: 2004 - RNA, 19 nt, synthetic construct
  source 1..19: mol_type = other RNA
aaaaatgtcctatttttca

SEQ ID NO: 2005 - RNA, 19 nt, synthetic construct
  source 1..19: mol_type = other RNA
taaaaatgtcctatttttc

SEQ ID NO: 2006 - RNA, 19 nt, synthetic construct
  source 1..19: mol_type = other RNA
ataaaaatgtcctattttt

SEQ ID NO: 2007 - RNA, 19 nt, synthetic construct
  source 1..19: mol_type = other RNA
aataaaaatgtcctatttt

SEQ ID NO: 2008 - RNA, 19 nt, synthetic construct
  source 1..19: mol_type = other RNA
taataaaaatgtcctattt

SEQ ID NO: 2009 - RNA, 19 nt, synthetic construct
  source 1..19: mol_type = other RNA
ttaataaaaatgtcctatt

SEQ ID NO: 2010 - RNA, 19 nt, synthetic construct
  source 1..19: mol_type = other RNA
tttaataaaaatgtcctat

SEQ ID NO: 2011 - RNA, 19 nt, synthetic construct
  source 1..19: mol_type = other RNA
ttttaataaaaatgtccta

SEQ ID NO: 2012 - RNA, 19 nt, synthetic construct
  source 1..19: mol_type = other RNA
attttaataaaaatgtcct

SEQ ID NO: 2013 - RNA, 19 nt, synthetic construct
  source 1..19: mol_type = other RNA
tattttaataaaaatgtcc

SEQ ID NO: 2014 - RNA, 19 nt, synthetic construct
  source 1..19: mol_type = other RNA
ttattttaataaaaatgtc

SEQ ID NO: 2015 - RNA, 19 nt, synthetic construct
  source 1..19: mol_type = other RNA
tttattttaataaaaatgt

SEQ ID NO: 2016 - RNA, 19 nt, synthetic construct
  source 1..19: mol_type = other RNA
ctttattttaataaaaatg

SEQ ID NO: 2017 - RNA, 19 nt, synthetic construct
  source 1..19: mol_type = other RNA
actttattttaataaaaat

SEQ ID NO: 2018 - RNA, 19 nt, synthetic construct
  source 1..19: mol_type = other RNA
aactttattttaataaaaa

SEQ ID NO: 2019 - RNA, 19 nt, synthetic construct
  source 1..19: mol_type = other RNA
gaactttattttaataaaa

SEQ ID NO: 2020 - RNA, 19 nt, synthetic construct
  source 1..19: mol_type = other RNA
agaactttattttaataaa

SEQ ID NO: 2021 - RNA, 19 nt, synthetic construct
  source 1..19: mol_type = other RNA
gagaactttattttaataa

SEQ ID NO: 2022 - RNA, 19 nt, synthetic construct
  source 1..19: mol_type = other RNA
agagaactttattttaata

SEQ ID NO: 2023 - RNA, 19 nt, synthetic construct
  source 1..19: mol_type = other RNA
aagagaactttattttaat

SEQ ID NO: 2024 - RNA, 19 nt, synthetic construct
  source 1..19: mol_type = other RNA
taagagaactttattttaa

SEQ ID NO: 2025 - RNA, 19 nt, synthetic construct
  source 1..19: mol_type = other RNA
ctaagagaactttatttta

SEQ ID NO: 2026 - RNA, 19 nt, synthetic construct
  source 1..19: mol_type = other RNA
gctaagagaactttatttt

SEQ ID NO: 2027 - RNA, 19 nt, synthetic construct
  source 1..19: mol_type = other RNA
cgctaagagaactttattt

SEQ ID NO: 2028 - RNA, 19 nt, synthetic construct
  source 1..19: mol_type = other RNA
acgctaagagaactttatt

SEQ ID NO: 2029 - RNA, 19 nt, synthetic construct
  source 1..19: mol_type = other RNA
aacgctaagagaactttat

SEQ ID NO: 2030 - RNA, 19 nt, synthetic construct
  source 1..19: mol_type = other RNA
aaacgctaagagaacttta

SEQ ID NO: 2031 - RNA, 19 nt, synthetic construct
  source 1..19: mol_type = other RNA
caaacgctaagagaacttt

SEQ ID NO: 2032 - RNA, 19 nt, synthetic construct
  source 1..19: mol_type = other RNA
acaaacgctaagagaactt

SEQ ID NO: 2033 - RNA, 19 nt, synthetic construct
  source 1..19: mol_type = other RNA
cacaaacgctaagagaact

SEQ ID NO: 2034 - RNA, 19 nt, synthetic construct
  source 1..19: mol_type = other RNA
ccacaaacgctaagagaac

SEQ ID NO: 2035 - RNA, 19 nt, synthetic construct
  source 1..19: mol_type = other RNA
tccacaaacgctaagagaa

SEQ ID NO: 2036 - RNA, 19 nt, synthetic construct
  source 1..19: mol_type = other RNA
ttccacaaacgctaagaga

SEQ ID NO: 2037 - RNA, 19 nt, synthetic construct
  source 1..19: mol_type = other RNA
attccacaaacgctaagag

SEQ ID NO: 2038 - RNA, 19 nt, synthetic construct
  source 1..19: mol_type = other RNA
gattccacaaacgctaaga

SEQ ID NO: 2039 - RNA, 19 nt, synthetic construct
  source 1..19: mol_type = other RNA
agattccacaaacgctaag

SEQ ID NO: 2040 - RNA, 19 nt, synthetic construct
  source 1..19: mol_type = other RNA
cagattccacaaacgctaa

SEQ ID NO: 2041 - RNA, 19 nt, synthetic construct
  source 1..19: mol_type = other RNA
gcagattccacaaacgcta

SEQ ID NO: 2042 - RNA, 19 nt, synthetic construct
  source 1..19: mol_type = other RNA
ggcagattccacaaacgct

SEQ ID NO: 2043 - RNA, 19 nt, synthetic construct
  source 1..19: mol_type = other RNA
cggcagattccacaaacgc

SEQ ID NO: 2044 - RNA, 19 nt, synthetic construct
  source 1..19: mol_type = other RNA
tcggcagattccacaaacg

SEQ ID NO: 2045 - RNA, 19 nt, synthetic construct
  source 1..19: mol_type = other RNA
ctcggcagattccacaaac

SEQ ID NO: 2046 - RNA, 19 nt, synthetic construct
  source 1..19: mol_type = other RNA
gctcggcagattccacaaa

SEQ ID NO: 2047 - RNA, 19 nt, synthetic construct
  source 1..19: mol_type = other RNA
ggctcggcagattccacaa

SEQ ID NO: 2048 - RNA, 19 nt, synthetic construct
  source 1..19: mol_type = other RNA
tggctcggcagattccaca

SEQ ID NO: 2049 - RNA, 19 nt, synthetic construct
  source 1..19: mol_type = other RNA
atggctcggcagattccac

SEQ ID NO: 2050 - RNA, 19 nt, synthetic construct
  source 1..19: mol_type = other RNA
aatggctcggcagattcca

SEQ ID NO: 2051 - RNA, 19 nt, synthetic construct
  source 1..19: mol_type = other RNA
aaatggctcggcagattcc

SEQ ID NO: 2052 - RNA, 19 nt, synthetic construct
  source 1..19: mol_type = other RNA
aaaatggctcggcagattc

SEQ ID NO: 2053 - RNA, 19 nt, synthetic construct
  source 1..19: mol_type = other RNA
caaaatggctcggcagatt

SEQ ID NO: 2054 - RNA, 19 nt, synthetic construct
  source 1..19: mol_type = other RNA
acaaaatggctcggcagat

SEQ ID NO: 2055 - RNA, 19 nt, synthetic construct
  source 1..19: mol_type = other RNA
cacaaaatggctcggcaga

SEQ ID NO: 2056 - RNA, 19 nt, synthetic construct
  source 1..19: mol_type = other RNA
ccacaaaatggctcggcag

SEQ ID NO: 2057 - RNA, 19 nt, synthetic construct
  source 1..19: mol_type = other RNA
tccacaaaatggctcggca

SEQ ID NO: 2058 - RNA, 19 nt, synthetic construct
  source 1..19: mol_type = other RNA
ttccacaaaatggctcggc

SEQ ID NO: 2059 - RNA, 19 nt, synthetic construct
  source 1..19: mol_type = other RNA
tttccacaaaatggctcgg

SEQ ID NO: 2060 - RNA, 19 nt, synthetic construct
  source 1..19: mol_type = other RNA
atttccacaaaatggctcg

SEQ ID NO: 2061 - RNA, 19 nt, synthetic construct
  source 1..19: mol_type = other RNA
aatttccacaaaatggctc

SEQ ID NO: 2062 - RNA, 19 nt, synthetic construct
  source 1..19: mol_type = other RNA
caatttccacaaaatggct

SEQ ID NO: 2063 - RNA, 19 nt, synthetic construct
  source 1..19: mol_type = other RNA
ccaatttccacaaaatggc

SEQ ID NO: 2064 - RNA, 19 nt, synthetic construct
  source 1..19: mol_type = other RNA
cccaatttccacaaaatgg

SEQ ID NO: 2065 - RNA, 19 nt, synthetic construct
  source 1..19: mol_type = other RNA
tcccaatttccacaaaatg

SEQ ID NO: 2066 - RNA, 19 nt, synthetic construct
  source 1..19: mol_type = other RNA
atcccaatttccacaaaat

SEQ ID NO: 2067 - RNA, 19 nt, synthetic construct
  source 1..19: mol_type = other RNA
gatcccaatttccacaaaa

SEQ ID NO: 2068 - RNA, 19 nt, synthetic construct
  source 1..19: mol_type = other RNA
ggatcccaatttccacaaa

SEQ ID NO: 2069 - RNA, 19 nt, synthetic construct
  source 1..19: mol_type = other RNA
tggatcccaatttccacaa

SEQ ID NO: 2070 - RNA, 19 nt, synthetic construct
  source 1..19: mol_type = other RNA
atggatcccaatttccaca

SEQ ID NO: 2071 - RNA, 19 nt, synthetic construct
  source 1..19: mol_type = other RNA
tatggatcccaatttccac

SEQ ID NO: 2072 - RNA, 19 nt, synthetic construct
  source 1..19: mol_type = other RNA
atatggatcccaatttcca

SEQ ID NO: 2073 - RNA, 19 nt, synthetic construct
  source 1..19: mol_type = other RNA
gatatggatcccaatttcc

SEQ ID NO: 2074 - RNA, 19 nt, synthetic construct
  source 1..19: mol_type = other RNA
agatatggatcccaatttc

SEQ ID NO: 2075 - RNA, 19 nt, synthetic construct
  source 1..19: mol_type = other RNA
cagatatggatcccaattt

SEQ ID NO: 2076 - RNA, 19 nt, synthetic construct
  source 1..19: mol_type = other RNA
ccagatatggatcccaatt

SEQ ID NO: 2077 - RNA, 19 nt, synthetic construct
  source 1..19: mol_type = other RNA
tccagatatggatcccaat

SEQ ID NO: 2078 - RNA, 19 nt, synthetic construct
  source 1..19: mol_type = other RNA
ctccagatatggatcccaa

SEQ ID NO: 2079 - RNA, 19 nt, synthetic construct
  source 1..19: mol_type = other RNA
tctccagatatggatccca

SEQ ID NO: 2080 - RNA, 19 nt, synthetic construct
  source 1..19: mol_type = other RNA
gtctccagatatggatccc

SEQ ID NO: 2081 - RNA, 19 nt, synthetic construct
  source 1..19: mol_type = other RNA
tgtctccagatatggatcc

SEQ ID NO: 2082 - RNA, 19 nt, synthetic construct
  source 1..19: mol_type = other RNA
gtgtctccagatatggatc

SEQ ID NO: 2083 - RNA, 19 nt, synthetic construct
  source 1..19: mol_type = other RNA
agtgtctccagatatggat

SEQ ID NO: 2084 - RNA, 19 nt, synthetic construct
  source 1..19: mol_type = other RNA
aagtgtctccagatatgga

SEQ ID NO: 2085 - RNA, 19 nt, synthetic construct
  source 1..19: mol_type = other RNA
gaagtgtctccagatatgg

SEQ ID NO: 2086 - RNA, 19 nt, synthetic construct
  source 1..19: mol_type = other RNA
ggaagtgtctccagatatg

SEQ ID NO: 2087 - RNA, 19 nt, synthetic construct
  source 1..19: mol_type = other RNA
gggaagtgtctccagatat

SEQ ID NO: 2088 - RNA, 19 nt, synthetic construct
  source 1..19: mol_type = other RNA
tgggaagtgtctccagata

SEQ ID NO: 2089 - RNA, 19 nt, synthetic construct
  source 1..19: mol_type = other RNA
ttgggaagtgtctccagat

SEQ ID NO: 2090 - RNA, 19 nt, synthetic construct
  source 1..19: mol_type = other RNA
cttgggaagtgtctccaga

SEQ ID NO: 2091 - RNA, 19 nt, synthetic construct
  source 1..19: mol_type = other RNA
ccttgggaagtgtctccag

SEQ ID NO: 2092 - RNA, 19 nt, synthetic construct
  source 1..19: mol_type = other RNA
gccttgggaagtgtctcca

SEQ ID NO: 2093 - RNA, 19 nt, synthetic construct
  source 1..19: mol_type = other RNA
ggccttgggaagtgtctcc

SEQ ID NO: 2094 - RNA, 19 nt, synthetic construct
  source 1..19: mol_type = other RNA
aggccttgggaagtgtctc

SEQ ID NO: 2095 - RNA, 19 nt, synthetic construct
  source 1..19: mol_type = other RNA
caggccttgggaagtgtct

SEQ ID NO: 2096 - RNA, 19 nt, synthetic construct
  source 1..19: mol_type = other RNA
gcaggccttgggaagtgtc

SEQ ID NO: 2097 - RNA, 19 nt, synthetic construct
  source 1..19: mol_type = other RNA
ggcaggccttgggaagtgt

SEQ ID NO: 2098 - RNA, 19 nt, synthetic construct
  source 1..19: mol_type = other RNA
aggcaggccttgggaagtg

SEQ ID NO: 2099 - RNA, 19 nt, synthetic construct
  source 1..19: mol_type = other RNA
gaggcaggccttgggaagt

SEQ ID NO: 2100 - RNA, 19 nt, synthetic construct
  source 1..19: mol_type = other RNA
tgaggcaggccttgggaag

SEQ ID NO: 2101 - RNA, 19 nt, synthetic construct
  source 1..19: mol_type = other RNA
gtgaggcaggccttgggaa

SEQ ID NO: 2102 - RNA, 19 nt, synthetic construct
  source 1..19: mol_type = other RNA
ggtgaggcaggccttggga

SEQ ID NO: 2103 - RNA, 19 nt, synthetic construct
  source 1..19: mol_type = other RNA
aggtgaggcaggccttggg

SEQ ID NO: 2104 - RNA, 19 nt, synthetic construct
  source 1..19: mol_type = other RNA
gaggtgaggcaggccttgg

SEQ ID NO: 2105 - RNA, 19 nt, synthetic construct
  source 1..19: mol_type = other RNA
ggaggtgaggcaggccttg

SEQ ID NO: 2106 - RNA, 19 nt, synthetic construct
  source 1..19: mol_type = other RNA
tggaggtgaggcaggcctt

SEQ ID NO: 2107 - RNA, 19 nt, synthetic construct
  source 1..19: mol_type = other RNA
gtggaggtgaggcaggcct

SEQ ID NO: 2108 - RNA, 19 nt, synthetic construct
  source 1..19: mol_type = other RNA
ggtggaggtgaggcaggcc

SEQ ID NO: 2109 - RNA, 19 nt, synthetic construct
  source 1..19: mol_type = other RNA
gggtggaggtgaggcaggc

SEQ ID NO: 2110 - RNA, 19 nt, synthetic construct
  source 1..19: mol_type = other RNA
ggggtggaggtgaggcagg

SEQ ID NO: 2111 - RNA, 19 nt, synthetic construct
  source 1..19: mol_type = other RNA
gggggtggaggtgaggcag

SEQ ID NO: 2112 - RNA, 19 nt, synthetic construct
  source 1..19: mol_type = other RNA
agggggtggaggtgaggca

SEQ ID NO: 2113 - RNA, 19 nt, synthetic construct
  source 1..19: mol_type = other RNA
cagggggtggaggtgaggc

SEQ ID NO: 2114 - RNA, 19 nt, synthetic construct
  source 1..19: mol_type = other RNA
gcagggggtggaggtgagg

SEQ ID NO: 2115 - RNA, 19 nt, synthetic construct
  source 1..19: mol_type = other RNA
ggcagggggtggaggtgag

SEQ ID NO: 2116 - RNA, 19 nt, synthetic construct
  source 1..19: mol_type = other RNA
gggcagggggtggaggtga

SEQ ID NO: 2117 - RNA, 19 nt, synthetic construct
  source 1..19: mol_type = other RNA
tgggcagggggtggaggtg

SEQ ID NO: 2118 - RNA, 19 nt, synthetic construct
  source 1..19: mol_type = other RNA
gtgggcagggggtggaggt

SEQ ID NO: 2119 - RNA, 19 nt, synthetic construct
  source 1..19: mol_type = other RNA
ggtgggcagggggtggagg

SEQ ID NO: 2120 - RNA, 19 nt, synthetic construct
  source 1..19: mol_type = other RNA
aggtgggcagggggtggag

SEQ ID NO: 2121 - RNA, 19 nt, synthetic construct
  source 1..19: mol_type = other RNA
aaggtgggcagggggtgga

SEQ ID NO: 2122 - RNA, 19 nt, synthetic construct
  source 1..19: mol_type = other RNA
caaggtgggcagggggtgg

SEQ ID NO: 2123 - RNA, 19 nt, synthetic construct
  source 1..19: mol_type = other RNA
tcaaggtgggcagggggtg

SEQ ID NO: 2124 - RNA, 19 nt, synthetic construct
  source 1..19: mol_type = other RNA
atcaaggtgggcagggggt

SEQ ID NO: 2125 - RNA, 19 nt, synthetic construct
  source 1..19: mol_type = other RNA
gatcaaggtgggcaggggg

SEQ ID NO: 2126 - RNA, 19 nt, synthetic construct
  source 1..19: mol_type = other RNA
ggatcaaggtgggcagggg

SEQ ID NO: 2127 - RNA, 19 nt, synthetic construct
  source 1..19: mol_type = other RNA
tggatcaaggtgggcaggg

SEQ ID NO: 2128 - RNA, 19 nt, synthetic construct
  source 1..19: mol_type = other RNA
atggatcaaggtgggcagg

SEQ ID NO: 2129 - RNA, 19 nt, synthetic construct
  source 1..19: mol_type = other RNA
catggatcaaggtgggcag

SEQ ID NO: 2130 - RNA, 19 nt, synthetic construct
  source 1..19: mol_type = other RNA
gcatggatcaaggtgggca

SEQ ID NO: 2131 - RNA, 19 nt, synthetic construct
  source 1..19: mol_type = other RNA
agcatggatcaaggtgggc

SEQ ID NO: 2132 - RNA, 19 nt, synthetic construct
  source 1..19: mol_type = other RNA
gagcatggatcaaggtggg

SEQ ID NO: 2133 - RNA, 19 nt, synthetic construct
  source 1..19: mol_type = other RNA
ggagcatggatcaaggtgg

SEQ ID NO: 2134 - RNA, 19 nt, synthetic construct
  source 1..19: mol_type = other RNA
aggagcatggatcaaggtg

SEQ ID NO: 2135 - RNA, 19 nt, synthetic construct
  source 1..19: mol_type = other RNA
aaggagcatggatcaaggt

SEQ ID NO: 2136 - RNA, 19 nt, synthetic construct
  source 1..19: mol_type = other RNA
aaaggagcatggatcaagg

SEQ ID NO: 2137 - RNA, 19 nt, synthetic construct
  source 1..19: mol_type = other RNA
caaaggagcatggatcaag

SEQ ID NO: 2138 - RNA, 19 nt, synthetic construct
  source 1..19: mol_type = other RNA
tcaaaggagcatggatcaa

SEQ ID NO: 2139 - RNA, 19 nt, synthetic construct
  source 1..19: mol_type = other RNA
gtcaaaggagcatggatca

SEQ ID NO: 2140 - RNA, 19 nt, synthetic construct
  source 1..19: mol_type = other RNA
ggtcaaaggagcatggatc

SEQ ID NO: 2141 - RNA, 19 nt, synthetic construct
  source 1..19: mol_type = other RNA
aggtcaaaggagcatggat

SEQ ID NO: 2142 - RNA, 19 nt, synthetic construct
  source 1..19: mol_type = other RNA
gaggtcaaaggagcatgga

SEQ ID NO: 2143 - RNA, 19 nt, synthetic construct
  source 1..19: mol_type = other RNA
ggaggtcaaaggagcatgg

SEQ ID NO: 2144 - RNA, 19 nt, synthetic construct
  source 1..19: mol_type = other RNA
aggaggtcaaaggagcatg

SEQ ID NO: 2145 - RNA, 19 nt, synthetic construct
  source 1..19: mol_type = other RNA
gaggaggtcaaaggagcat

SEQ ID NO: 2146 - RNA, 19 nt, synthetic construct
  source 1..19: mol_type = other RNA
cgaggaggtcaaaggagca

SEQ ID NO: 2147 - RNA, 19 nt, synthetic construct
  source 1..19: mol_type = other RNA
acgaggaggtcaaaggagc

SEQ ID NO: 2148 - RNA, 19 nt, synthetic construct
  source 1..19: mol_type = other RNA
cacgaggaggtcaaaggag

SEQ ID NO: 2149 - RNA, 19 nt, synthetic construct
  source 1..19: mol_type = other RNA
acacgaggaggtcaaagga

SEQ ID NO: 2150 - RNA, 19 nt, synthetic construct
  source 1..19: mol_type = other RNA
cacacgaggaggtcaaagg

SEQ ID NO: 2151 - RNA, 19 nt, synthetic construct
  source 1..19: mol_type = other RNA
tcacacgaggaggtcaaag

SEQ ID NO: 2152 - RNA, 19 nt, synthetic construct
  source 1..19: mol_type = other RNA
ctcacacgaggaggtcaaa

SEQ ID NO: 2153 - RNA, 19 nt, synthetic construct
  source 1..19: mol_type = other RNA
tctcacacgaggaggtcaa

SEQ ID NO: 2154 - RNA, 19 nt, synthetic construct
  source 1..19: mol_type = other RNA
ttctcacacgaggaggtca

SEQ ID NO: 2155 - RNA, 19 nt, synthetic construct
  source 1..19: mol_type = other RNA
gttctcacacgaggaggtc

SEQ ID NO: 2156 - RNA, 19 nt, synthetic construct
  source 1..19: mol_type = other RNA
ggttctcacacgaggaggt

SEQ ID NO: 2157 - RNA, 19 nt, synthetic construct
  source 1..19: mol_type = other RNA
gggttctcacacgaggagg

SEQ ID NO: 2158 - RNA, 19 nt, synthetic construct
  source 1..19: mol_type = other RNA
ggggttctcacacgaggag

SEQ ID NO: 2159 - RNA, 19 nt, synthetic construct
  source 1..19: mol_type = other RNA
aggggttctcacacgagga

SEQ ID NO: 2160 - RNA, 19 nt, synthetic construct
  source 1..19: mol_type = other RNA
aaggggttctcacacgagg

SEQ ID NO: 2161 - RNA, 19 nt, synthetic construct
  source 1..19: mol_type = other RNA
aaaggggttctcacacgag

SEQ ID NO: 2162 - RNA, 19 nt, synthetic construct
  source 1..19: mol_type = other RNA
caaaggggttctcacacga

SEQ ID NO: 2163 - RNA, 19 nt, synthetic construct
  source 1..19: mol_type = other RNA
gcaaaggggttctcacacg

SEQ ID NO: 2164 - RNA, 19 nt, synthetic construct
  source 1..19: mol_type = other RNA
ggcaaaggggttctcacac

SEQ ID NO: 2165 - RNA, 19 nt, synthetic construct
  source 1..19: mol_type = other RNA
tggcaaaggggttctcaca

SEQ ID NO: 2166 - RNA, 19 nt, synthetic construct
  source 1..19: mol_type = other RNA
ctggcaaaggggttctcac

SEQ ID NO: 2167 - RNA, 19 nt, synthetic construct
  source 1..19: mol_type = other RNA
tctggcaaaggggttctca

SEQ ID NO: 2168 - RNA, 19 nt, synthetic construct
  source 1..19: mol_type = other RNA
ctctggcaaaggggttctc

SEQ ID NO: 2169 - RNA, 19 nt, synthetic construct
  source 1..19: mol_type = other RNA
actctggcaaaggggttct

SEQ ID NO: 2170 - RNA, 19 nt, synthetic construct
  source 1..19: mol_type = other RNA
cactctggcaaaggggttc

SEQ ID NO: 2171 - RNA, 19 nt, synthetic construct
  source 1..19: mol_type = other RNA
tcactctggcaaaggggtt

SEQ ID NO: 2172 - RNA, 19 nt, synthetic construct
  source 1..19: mol_type = other RNA
ctcactctggcaaaggggt

SEQ ID NO: 2173 - RNA, 19 nt, synthetic construct
  source 1..19: mol_type = other RNA
tctcactctggcaaagggg

SEQ ID NO: 2174 - RNA, 19 nt, synthetic construct
  source 1..19: mol_type = other RNA
gtctcactctggcaaaggg

SEQ ID NO: 2175 - RNA, 19 nt, synthetic construct
  source 1..19: mol_type = other RNA
cgtctcactctggcaaagg

SEQ ID NO: 2176 - RNA, 19 nt, synthetic construct
  source 1..19: mol_type = other RNA
acgtctcactctggcaaag

SEQ ID NO: 2177 - RNA, 19 nt, synthetic construct
  source 1..19: mol_type = other RNA
cacgtctcactctggcaaa

SEQ ID NO: 2178 - RNA, 19 nt, synthetic construct
  source 1..19: mol_type = other RNA
acacgtctcactctggcaa

SEQ ID NO: 2179 - RNA, 19 nt, synthetic construct
  source 1..19: mol_type = other RNA
cacacgtctcactctggca

SEQ ID NO: 2180 - RNA, 19 nt, synthetic construct
  source 1..19: mol_type = other RNA
gcacacgtctcactctggc

SEQ ID NO: 2181 - RNA, 19 nt, synthetic construct
  source 1..19: mol_type = other RNA
tgcacacgtctcactctgg

SEQ ID NO: 2182 - RNA, 19 nt, synthetic construct
  source 1..19: mol_type = other RNA
ctgcacacgtctcactctg

SEQ ID NO: 2183 - RNA, 19 nt, synthetic construct
  source 1..19: mol_type = other RNA
tctgcacacgtctcactct

SEQ ID NO: 2184 - RNA, 19 nt, synthetic construct
  source 1..19: mol_type = other RNA
ttctgcacacgtctcactc

SEQ ID NO: 2185 - RNA, 19 nt, synthetic construct
  source 1..19: mol_type = other RNA
attctgcacacgtctcact

SEQ ID NO: 2186 - RNA, 19 nt, synthetic construct
  source 1..19: mol_type = other RNA
cattctgcacacgtctcac

SEQ ID NO: 2187 - RNA, 19 nt, synthetic construct
  source 1..19: mol_type = other RNA
tcattctgcacacgtctca

SEQ ID NO: 2188 - RNA, 19 nt, synthetic construct
  source 1..19: mol_type = other RNA
ttcattctgcacacgtctc

SEQ ID NO: 2189 - RNA, 19 nt, synthetic construct
  source 1..19: mol_type = other RNA
gttcattctgcacacgtct

SEQ ID NO: 2190 - RNA, 19 nt, synthetic construct
  source 1..19: mol_type = other RNA
agttcattctgcacacgtc

SEQ ID NO: 2191 - RNA, 19 nt, synthetic construct
  source 1..19: mol_type = other RNA
tagttcattctgcacacgt

SEQ ID NO: 2192 - RNA, 19 nt, synthetic construct
  source 1..19: mol_type = other RNA
ttagttcattctgcacacg

SEQ ID NO: 2193 - RNA, 19 nt, synthetic construct
  source 1..19: mol_type = other RNA
cttagttcattctgcacac

SEQ ID NO: 2194 - RNA, 19 nt, synthetic construct
  source 1..19: mol_type = other RNA
gcttagttcattctgcaca

SEQ ID NO: 2195 - RNA, 19 nt, synthetic construct
  source 1..19: mol_type = other RNA
ggcttagttcattctgcac

SEQ ID NO: 2196 - RNA, 19 nt, synthetic construct
  source 1..19: mol_type = other RNA
gggcttagttcattctgca

SEQ ID NO: 2197 - RNA, 19 nt, synthetic construct
  source 1..19: mol_type = other RNA
ggggcttagttcattctgc

SEQ ID NO: 2198 - RNA, 19 nt, synthetic construct
  source 1..19: mol_type = other RNA
tggggcttagttcattctg

SEQ ID NO: 2199 - RNA, 19 nt, synthetic construct
  source 1..19: mol_type = other RNA
ctggggcttagttcattct

SEQ ID NO: 2200 - RNA, 19 nt, synthetic construct
  source 1..19: mol_type = other RNA
tctggggcttagttcattc

SEQ ID NO: 2201 - RNA, 19 nt, synthetic construct
  source 1..19: mol_type = other RNA
ctctggggcttagttcatt

SEQ ID NO: 2202 - RNA, 19 nt, synthetic construct
  source 1..19: mol_type = other RNA
cctctggggcttagttcat

SEQ ID NO: 2203 - RNA, 19 nt, synthetic construct
  source 1..19: mol_type = other RNA
ccctctggggcttagttca

SEQ ID NO: 2204 - RNA, 19 nt, synthetic construct
  source 1..19: mol_type = other RNA
accctctggggcttagttc

SEQ ID NO: 2205 - RNA, 19 nt, synthetic construct
  source 1..19: mol_type = other RNA
aaccctctggggcttagtt

SEQ ID NO: 2206 - RNA, 19 nt, synthetic construct
  source 1..19: mol_type = other RNA
aaaccctctggggcttagt

SEQ ID NO: 2207 - RNA, 19 nt, synthetic construct
  source 1..19: mol_type = other RNA
aaaaccctctggggcttag

SEQ ID NO: 2208 - RNA, 19 nt, synthetic construct
  source 1..19: mol_type = other RNA
taaaaccctctggggctta

SEQ ID NO: 2209 - RNA, 19 nt, synthetic construct
  source 1..19: mol_type = other RNA
ttaaaaccctctggggctt

SEQ ID NO: 2210 - RNA, 19 nt, synthetic construct
  source 1..19: mol_type = other RNA
attaaaaccctctggggct

SEQ ID NO: 2211 - RNA, 19 nt, synthetic construct
  source 1..19: mol_type = other RNA
cattaaaaccctctggggc

SEQ ID NO: 2212 - RNA, 19 nt, synthetic construct
  source 1..19: mol_type = other RNA
ccattaaaaccctctgggg

SEQ ID NO: 2213 - RNA, 19 nt, synthetic construct
  source 1..19: mol_type = other RNA
gccattaaaaccctctggg

SEQ ID NO: 2214 - RNA, 19 nt, synthetic construct
  source 1..19: mol_type = other RNA
agccattaaaaccctctgg

SEQ ID NO: 2215 - RNA, 19 nt, synthetic construct
  source 1..19: mol_type = other RNA
aagccattaaaaccctctg

SEQ ID NO: 2216 - RNA, 19 nt, synthetic construct
  source 1..19: mol_type = other RNA
caagccattaaaaccctct

SEQ ID NO: 2217 - RNA, 19 nt, synthetic construct
  source 1..19: mol_type = other RNA
gcaagccattaaaaccctc

SEQ ID NO: 2218 - RNA, 19 nt, synthetic construct
  source 1..19: mol_type = other RNA
ggcaagccattaaaaccct

SEQ ID NO: 2219 - RNA, 19 nt, synthetic construct
  source 1..19: mol_type = other RNA
aggcaagccattaaaaccc

SEQ ID NO: 2220 - RNA, 19 nt, synthetic construct
  source 1..19: mol_type = other RNA
caggcaagccattaaaacc

SEQ ID NO: 2221 - RNA, 19 nt, synthetic construct
  source 1..19: mol_type = other RNA
gcaggcaagccattaaaac

SEQ ID NO: 2222 - RNA, 19 nt, synthetic construct
  source 1..19: mol_type = other RNA
agcaggcaagccattaaaa

SEQ ID NO: 2223 - RNA, 19 nt, synthetic construct
  source 1..19: mol_type = other RNA
cagcaggcaagccattaaa

SEQ ID NO: 2224 - RNA, 19 nt, synthetic construct
  source 1..19: mol_type = other RNA
acagcaggcaagccattaa

SEQ ID NO: 2225 - RNA, 19 nt, synthetic construct
  source 1..19: mol_type = other RNA
aacagcaggcaagccatta

SEQ ID NO: 2226 - RNA, 19 nt, synthetic construct
  source 1..19: mol_type = other RNA
aaacagcaggcaagccatt

SEQ ID NO: 2227 - RNA, 19 nt, synthetic construct
  source 1..19: mol_type = other RNA
gaaacagcaggcaagccat

SEQ ID NO: 2228 - RNA, 19 nt, synthetic construct
  source 1..19: mol_type = other RNA
ggaaacagcaggcaagcca

SEQ ID NO: 2229 - RNA, 19 nt, synthetic construct
  source 1..19: mol_type = other RNA
gggaaacagcaggcaagcc

SEQ ID NO: 2230 - RNA, 19 nt, synthetic construct
  source 1..19: mol_type = other RNA
tgggaaacagcaggcaagc

SEQ ID NO: 2231 - RNA, 19 nt, synthetic construct
  source 1..19: mol_type = other RNA
gtgggaaacagcaggcaag

SEQ ID NO: 2232 - RNA, 19 nt, synthetic construct
  source 1..19: mol_type = other RNA
tgtgggaaacagcaggcaa

SEQ ID NO: 2233 - RNA, 19 nt, synthetic construct
  source 1..19: mol_type = other RNA
atgtgggaaacagcaggca

SEQ ID NO: 2234 - RNA, 19 nt, synthetic construct
  source 1..19: mol_type = other RNA
tatgtgggaaacagcaggc

SEQ ID NO: 2235 - RNA, 19 nt, synthetic construct
  source 1..19: mol_type = other RNA
ttatgtgggaaacagcagg

SEQ ID NO: 2236 - RNA, 19 nt, synthetic construct
  source 1..19: mol_type = other RNA
tttatgtgggaaacagcag

SEQ ID NO: 2237 - RNA, 19 nt, synthetic construct
  source 1..19: mol_type = other RNA
gtttatgtgggaaacagca

SEQ ID NO: 2238 - RNA, 19 nt, synthetic construct
  source 1..19: mol_type = other RNA
agtttatgtgggaaacagc

SEQ ID NO: 2239 - RNA, 19 nt, synthetic construct
  source 1..19: mol_type = other RNA
tagtttatgtgggaaacag

SEQ ID NO: 2240 - RNA, 19 nt, synthetic construct
  source 1..19: mol_type = other RNA
gtagtttatgtgggaaaca

SEQ ID NO: 2241 - RNA, 19 nt, synthetic construct
  source 1..19: mol_type = other RNA
ggtagtttatgtgggaaac

SEQ ID NO: 2242 - RNA, 19 nt, synthetic construct
  source 1..19: mol_type = other RNA
aggtagtttatgtgggaaa

SEQ ID NO: 2243 - RNA, 19 nt, synthetic construct
  source 1..19: mol_type = other RNA
gaggtagtttatgtgggaa

SEQ ID NO: 2244 - RNA, 19 nt, synthetic construct
  source 1..19: mol_type = other RNA
tgaggtagtttatgtggga

SEQ ID NO: 2245 - RNA, 19 nt, synthetic construct
  source 1..19: mol_type = other RNA
ctgaggtagtttatgtggg

SEQ ID NO: 2246 - RNA, 19 nt, synthetic construct
  source 1..19: mol_type = other RNA
cctgaggtagtttatgtgg

SEQ ID NO: 2247 - RNA, 19 nt, synthetic construct
  source 1..19: mol_type = other RNA
tcctgaggtagtttatgtg

SEQ ID NO: 2248 - RNA, 19 nt, synthetic construct
  source 1..19: mol_type = other RNA
ctcctgaggtagtttatgt

SEQ ID NO: 2249 - RNA, 19 nt, synthetic construct
  source 1..19: mol_type = other RNA
actcctgaggtagtttatg

SEQ ID NO: 2250 - RNA, 19 nt, synthetic construct
  source 1..19: mol_type = other RNA
gactcctgaggtagtttat

SEQ ID NO: 2251 - RNA, 19 nt, synthetic construct
  source 1..19: mol_type = other RNA
tgactcctgaggtagttta

SEQ ID NO: 2252 - RNA, 19 nt, synthetic construct
  source 1..19: mol_type = other RNA
gtgactcctgaggtagttt

SEQ ID NO: 2253 - RNA, 19 nt, synthetic construct
  source 1..19: mol_type = other RNA
agtgactcctgaggtagtt

SEQ ID NO: 2254 - RNA, 19 nt, synthetic construct
  source 1..19: mol_type = other RNA
cagtgactcctgaggtagt

SEQ ID NO: 2255 - RNA, 19 nt, synthetic construct
  source 1..19: mol_type = other RNA
acagtgactcctgaggtag

SEQ ID NO: 2256 - RNA, 19 nt, synthetic construct
  source 1..19: mol_type = other RNA
tacagtgactcctgaggta

SEQ ID NO: 2257 - RNA, 19 nt, synthetic construct
  source 1..19: mol_type = other RNA
ttacagtgactcctgaggt

SEQ ID NO: 2258 - RNA, 19 nt, synthetic construct
  source 1..19: mol_type = other RNA
tttacagtgactcctgagg

SEQ ID NO: 2259 - RNA, 19 nt, synthetic construct
  source 1..19: mol_type = other RNA
ttttacagtgactcctgag

SEQ ID NO: 2260 - RNA, 19 nt, synthetic construct
  source 1..19: mol_type = other RNA
attttacagtgactcctga

SEQ ID NO: 2261 - RNA, 19 nt, synthetic construct
  source 1..19: mol_type = other RNA
tattttacagtgactcctg

SEQ ID NO: 2262 - RNA, 19 nt, synthetic construct
  source 1..19: mol_type = other RNA
ttattttacagtgactcct

SEQ ID NO: 2263 - RNA, 19 nt, synthetic construct
  source 1..19: mol_type = other RNA
tttattttacagtgactcc

SEQ ID NO: 2264 - RNA, 19 nt, synthetic construct
  source 1..19: mol_type = other RNA
gtttattttacagtgactc

SEQ ID NO: 2265 - RNA, 19 nt, synthetic construct
  source 1..19: mol_type = other RNA
agtttattttacagtgact

SEQ ID NO: 2266 - RNA, 19 nt, synthetic construct
  source 1..19: mol_type = other RNA
cagtttattttacagtgac

SEQ ID NO: 2267 - RNA, 19 nt, synthetic construct
  source 1..19: mol_type = other RNA
ccagtttattttacagtga

SEQ ID NO: 2268 - RNA, 19 nt, synthetic construct
  source 1..19: mol_type = other RNA
gccagtttattttacagtg

SEQ ID NO: 2269 - RNA, 19 nt, synthetic construct
  source 1..19: mol_type = other RNA
ggccagtttattttacagt

SEQ ID NO: 2270 - RNA, 19 nt, synthetic construct
  source 1..19: mol_type = other RNA
aggccagtttattttacag

SEQ ID NO: 2271 - RNA, 19 nt, synthetic construct
  source 1..19: mol_type = other RNA
aaggccagtttattttaca

SEQ ID NO: 2272 - RNA, 19 nt, synthetic construct
  source 1..19: mol_type = other RNA
caaggccagtttattttac

SEQ ID NO: 2273 - RNA, 19 nt, synthetic construct
  source 1..19: mol_type = other RNA
acaaggccagtttatttta

SEQ ID NO: 2274 - RNA, 19 nt, synthetic construct
  source 1..19: mol_type = other RNA
aacaaggccagtttatttt

SEQ ID NO: 2275 - RNA, 19 nt, synthetic construct
  source 1..19: mol_type = other RNA
caacaaggccagtttattt

SEQ ID NO: 2276 - RNA, 19 nt, synthetic construct
  source 1..19: mol_type = other RNA
acaacaaggccagtttatt

SEQ ID NO: 2277 - RNA, 19 nt, synthetic construct
  source 1..19: mol_type = other RNA
gacaacaaggccagtttat

SEQ ID NO: 2278 - RNA, 19 nt, synthetic construct
  source 1..19: mol_type = other RNA
agacaacaaggccagttta

SEQ ID NO: 2279 - RNA, 19 nt, synthetic construct
  source 1..19: mol_type = other RNA
aagacaacaaggccagttt

SEQ ID NO: 2280 - RNA, 19 nt, synthetic construct
  source 1..19: mol_type = other RNA
taagacaacaaggccagtt

SEQ ID NO: 2281 - RNA, 21 nt, synthetic construct
  source 1..21: mol_type = other RNA
  modified_base 1: mod_base = OTHER; note = 2'-fluoro modified nucleoside with phosphorothioate linkage
  modified_base 2: mod_base = OTHER; note = 2'-O-methyl modified nucleoside with phosphorothioate linkage
  modified_base 3: mod_base = OTHER; note = 2'-fluoro modified nucleoside
  modified_base 4: mod_base = OTHER; note = 2'-O-methyl modified nucleoside
  modified_base 5: mod_base = OTHER; note = 2'-fluoro modified nucleoside
  modified_base 6: mod_base = OTHER; note = 2'-O-methyl modified nucleoside
  modified_base 7: mod_base = OTHER; note = 2'-fluoro modified nucleoside
  modified_base 8: mod_base = OTHER; note = 2'-O-methyl modified nucleoside
  modified_base 9: mod_base = OTHER; note = 2'-fluoro modified nucleoside
  modified_base 10: mod_base = OTHER; note = 2'-O-methyl modified nucleoside
  modified_base 11: mod_base = OTHER; note = 2'-fluoro modified nucleoside
  modified_base 12: mod_base = OTHER; note = 2'-O-methyl modified nucleoside
  modified_base 13: mod_base = OTHER; note = 2'-fluoro modified nucleoside
  modified_base 14: mod_base = OTHER; note = 2'-O-methyl modified nucleoside
  modified_base 15: mod_base = OTHER; note = 2'-fluoro modified nucleoside
  modified_base 16: mod_base = OTHER; note = 2'-O-methyl modified nucleoside
  modified_base 17: mod_base = OTHER; note = 2'-fluoro modified nucleoside
  modified_base 18: mod_base = OTHER; note = 2'-O-methyl modified nucleoside
  modified_base 19: mod_base = OTHER; note = 2'-fluoro modified nucleoside with phosphorothioate linkage
  modified_base 20: mod_base = OTHER; note = 2'-O-methyl modified nucleoside with phosphorothioate linkage
  modified_base 21: mod_base = OTHER; note = 2'-O-methyl modified nucleoside
tggctatggctagtgttaatt

SEQ ID NO: 2282 - RNA, 21 nt, synthetic construct
  source 1..21: mol_type = other RNA
  modified_base 1: mod_base = OTHER; note = 2'-fluoro modified nucleoside with phosphorothioate linkage
  modified_base 2: mod_base = OTHER; note = 2'-O-methyl modified nucleoside with phosphorothioate linkage
  modified_base 3: mod_base = OTHER; note = 2'-fluoro modified nucleoside
  modified_base 4: mod_base = OTHER; note = 2'-O-methyl modified nucleoside
  modified_base 5: mod_base = OTHER; note = 2'-fluoro modified nucleoside
  modified_base 6: mod_base = OTHER; note = 2'-O-methyl modified nucleoside
  modified_base 7: mod_base = OTHER; note = 2'-fluoro modified nucleoside
  modified_base 8: mod_base = OTHER; note = 2'-O-methyl modified nucleoside
  modified_base 9: mod_base = OTHER; note = 2'-fluoro modified nucleoside
  modified_base 10: mod_base = OTHER; note = 2'-O-methyl modified nucleoside
  modified_base 11: mod_base = OTHER; note = 2'-fluoro modified nucleoside
  modified_base 12: mod_base = OTHER; note = 2'-O-methyl modified nucleoside
  modified_base 13: mod_base = OTHER; note = 2'-fluoro modified nucleoside
  modified_base 14: mod_base = OTHER; note = 2'-O-methyl modified nucleoside
  modified_base 15: mod_base = OTHER; note = 2'-fluoro modified nucleoside
  modified_base 16: mod_base = OTHER; note = 2'-O-methyl modified nucleoside
  modified_base 17: mod_base = OTHER; note = 2'-fluoro modified nucleoside
  modified_base 18: mod_base = OTHER; note = 2'-O-methyl modified nucleoside
  modified_base 19: mod_base = OTHER; note = 2'-fluoro modified nucleoside with phosphorothioate linkage
  modified_base 20: mod_base = OTHER; note = 2'-O-methyl modified nucleoside with phosphorothioate linkage
  modified_base 21: mod_base = OTHER; note = 2'-O-methyl modified nucleoside
atcatacaaactctgtacatt

SEQ ID NO: 2283 - RNA, 21 nt, synthetic construct
  source 1..21: mol_type = other RNA
  modified_base 1: mod_base = OTHER; note = 2'-fluoro modified nucleoside with phosphorothioate linkage
  modified_base 2: mod_base = OTHER; note = 2'-O-methyl modified nucleoside with phosphorothioate linkage
  modified_base 3: mod_base = OTHER; note = 2'-fluoro modified nucleoside
  modified_base 4: mod_base = OTHER; note = 2'-O-methyl modified nucleoside
  modified_base 5: mod_base = OTHER; note = 2'-fluoro modified nucleoside
  modified_base 6: mod_base = OTHER; note = 2'-O-methyl modified nucleoside
  modified_base 7: mod_base = OTHER; note = 2'-fluoro modified nucleoside
  modified_base 8: mod_base = OTHER; note = 2'-O-methyl modified nucleoside
  modified_base 9: mod_base = OTHER; note = 2'-fluoro modified nucleoside
  modified_base 10: mod_base = OTHER; note = 2'-O-methyl modified nucleoside
  modified_base 11: mod_base = OTHER; note = 2'-fluoro modified nucleoside
  modified_base 12: mod_base = OTHER; note = 2'-O-methyl modified nucleoside
  modified_base 13: mod_base = OTHER; note = 2'-fluoro modified nucleoside
  modified_base 14: mod_base = OTHER; note = 2'-O-methyl modified nucleoside
  modified_base 15: mod_base = OTHER; note = 2'-fluoro modified nucleoside
  modified_base 16: mod_base = OTHER; note = 2'-O-methyl modified nucleoside
  modified_base 17: mod_base = OTHER; note = 2'-fluoro modified nucleoside
  modified_base 18: mod_base = OTHER; note = 2'-O-methyl modified nucleoside
  modified_base 19: mod_base = OTHER; note = 2'-fluoro modified nucleoside with phosphorothioate linkage
  modified_base 20: mod_base = OTHER; note = 2'-O-methyl modified nucleoside with phosphorothioate linkage
  modified_base 21: mod_base = OTHER; note = 2'-O-methyl modified nucleoside
ctgtacttcctggaatcgatt

SEQ ID NO: 2284 - RNA, 21 nt, synthetic construct
  source 1..21: mol_type = other RNA
  modified_base 1: mod_base = OTHER; note = 2'-fluoro modified nucleoside with phosphorothioate linkage
  modified_base 2: mod_base = OTHER; note = 2'-O-methyl modified nucleoside with phosphorothioate linkage
  modified_base 3: mod_base = OTHER; note = 2'-fluoro modified nucleoside
  modified_base 4: mod_base = OTHER; note = 2'-O-methyl modified nucleoside
  modified_base 5: mod_base = OTHER; note = 2'-fluoro modified nucleoside
  modified_base 6: mod_base = OTHER; note = 2'-O-methyl modified nucleoside
  modified_base 7: mod_base = OTHER; note = 2'-fluoro modified nucleoside
  modified_base 8: mod_base = OTHER; note = 2'-O-methyl modified nucleoside
  modified_base 9: mod_base = OTHER; note = 2'-fluoro modified nucleoside
  modified_base 10: mod_base = OTHER; note = 2'-O-methyl modified nucleoside
  modified_base 11: mod_base = OTHER; note = 2'-fluoro modified nucleoside
  modified_base 12: mod_base = OTHER; note = 2'-O-methyl modified nucleoside
  modified_base 13: mod_base = OTHER; note = 2'-fluoro modified nucleoside
  modified_base 14: mod_base = OTHER; note = 2'-O-methyl modified nucleoside
  modified_base 15: mod_base = OTHER; note = 2'-fluoro modified nucleoside
  modified_base 16: mod_base = OTHER; note = 2'-O-methyl modified nucleoside
  modified_base 17: mod_base = OTHER; note = 2'-fluoro modified nucleoside
  modified_base 18: mod_base = OTHER; note = 2'-O-methyl modified nucleoside
  modified_base 19: mod_base = OTHER; note = 2'-fluoro modified nucleoside with phosphorothioate linkage
  modified_base 20: mod_base = OTHER; note = 2'-O-methyl modified nucleoside with phosphorothioate linkage
  modified_base 21: mod_base = OTHER; note = 2'-O-methyl modified nucleoside
tgtacttcctggaatcgaatt

SEQ ID NO: 2285 - RNA, 21 nt, synthetic construct
  source 1..21: mol_type = other RNA
  modified_base 1: mod_base = OTHER; note = 2'-fluoro modified nucleoside with phosphorothioate linkage
  modified_base 2: mod_base = OTHER; note = 2'-O-methyl modified nucleoside with phosphorothioate linkage
  modified_base 3: mod_base = OTHER; note = 2'-fluoro modified nucleoside
  modified_base 4: mod_base = OTHER; note = 2'-O-methyl modified nucleoside
  modified_base 5: mod_base = OTHER; note = 2'-fluoro modified nucleoside
  modified_base 6: mod_base = OTHER; note = 2'-O-methyl modified nucleoside
  modified_base 7: mod_base = OTHER; note = 2'-fluoro modified nucleoside
  modified_base 8: mod_base = OTHER; note = 2'-O-methyl modified nucleoside
  modified_base 9: mod_base = OTHER; note = 2'-fluoro modified nucleoside
  modified_base 10: mod_base = OTHER; note = 2'-O-methyl modified nucleoside
  modified_base 11: mod_base = OTHER; note = 2'-fluoro modified nucleoside
  modified_base 12: mod_base = OTHER; note = 2'-O-methyl modified nucleoside
  modified_base 13: mod_base = OTHER; note = 2'-fluoro modified nucleoside
  modified_base 14: mod_base = OTHER; note = 2'-O-methyl modified nucleoside
  modified_base 15: mod_base = OTHER; note = 2'-fluoro modified nucleoside
  modified_base 16: mod_base = OTHER; note = 2'-O-methyl modified nucleoside
  modified_base 17: mod_base = OTHER; note = 2'-fluoro modified nucleoside
  modified_base 18: mod_base = OTHER; note = 2'-O-methyl modified nucleoside
  modified_base 19: mod_base = OTHER; note = 2'-fluoro modified nucleoside with phosphorothioate linkage
  modified_base 20: mod_base = OTHER; note = 2'-O-methyl modified nucleoside with phosphorothioate linkage
  modified_base 21: mod_base = OTHER; note = 2'-O-methyl modified nucleoside
gtacttcctggaatcgatatt

SEQ ID NO: 2286 - RNA, 21 nt, synthetic construct
  source 1..21: mol_type = other RNA
  modified_base 1: mod_base = OTHER; note = 2'-fluoro modified nucleoside with phosphorothioate linkage
  modified_base 2: mod_base = OTHER; note = 2'-O-methyl modified nucleoside with phosphorothioate linkage
  modified_base 3: mod_base = OTHER; note = 2'-fluoro modified nucleoside
  modified_base 4: mod_base = OTHER; note = 2'-O-methyl modified nucleoside
  modified_base 5: mod_base = OTHER; note = 2'-fluoro modified nucleoside
  modified_base 6: mod_base = OTHER; note = 2'-O-methyl modified nucleoside
  modified_base 7: mod_base = OTHER; note = 2'-fluoro modified nucleoside
  modified_base 8: mod_base = OTHER; note = 2'-O-methyl modified nucleoside
  modified_base 9: mod_base = OTHER; note = 2'-fluoro modified nucleoside
  modified_base 10: mod_base = OTHER; note = 2'-O-methyl modified nucleoside
  modified_base 11: mod_base = OTHER; note = 2'-fluoro modified nucleoside
  modified_base 12: mod_base = OTHER; note = 2'-O-methyl modified nucleoside
  modified_base 13: mod_base = OTHER; note = 2'-fluoro modified nucleoside
  modified_base 14: mod_base = OTHER; note = 2'-O-methyl modified nucleoside
  modified_base 15: mod_base = OTHER; note = 2'-fluoro modified nucleoside
  modified_base 16: mod_base = OTHER; note = 2'-O-methyl modified nucleoside
  modified_base 17: mod_base = OTHER; note = 2'-fluoro modified nucleoside
  modified_base 18: mod_base = OTHER; note = 2'-O-methyl modified nucleoside
  modified_base 19: mod_base = OTHER; note = 2'-fluoro modified nucleoside with phosphorothioate linkage
  modified_base 20: mod_base = OTHER; note = 2'-O-methyl modified nucleoside with phosphorothioate linkage
  modified_base 21: mod_base = OTHER; note = 2'-O-methyl modified nucleoside
tacttcctggaatcgataatt

SEQ ID NO: 2287 - RNA, 21 nt, synthetic construct
  source 1..21: mol_type = other RNA
  modified_base 1: mod_base = OTHER; note = 2'-fluoro modified nucleoside with phosphorothioate linkage
  modified_base 2: mod_base = OTHER; note = 2'-O-methyl modified nucleoside with phosphorothioate linkage
  modified_base 3: mod_base = OTHER; note = 2'-fluoro modified nucleoside
  modified_base 4: mod_base = OTHER; note = 2'-O-methyl modified nucleoside
  modified_base 5: mod_base = OTHER; note = 2'-fluoro modified nucleoside
  modified_base 6: mod_base = OTHER; note = 2'-O-methyl modified nucleoside
  modified_base 7: mod_base = OTHER; note = 2'-fluoro modified nucleoside
  modified_base 8: mod_base = OTHER; note = 2'-O-methyl modified nucleoside
  modified_base 9: mod_base = OTHER; note = 2'-fluoro modified nucleoside
  modified_base 10: mod_base = OTHER; note = 2'-O-methyl modified nucleoside
  modified_base 11: mod_base = OTHER; note = 2'-fluoro modified nucleoside
  modified_base 12: mod_base = OTHER; note = 2'-O-methyl modified nucleoside
  modified_base 13: mod_base = OTHER; note = 2'-fluoro modified nucleoside
  modified_base 14: mod_base = OTHER; note = 2'-O-methyl modified nucleoside
  modified_base 15: mod_base = OTHER; note = 2'-fluoro modified nucleoside
  modified_base 16: mod_base = OTHER; note = 2'-O-methyl modified nucleoside
  modified_base 17: mod_base = OTHER; note = 2'-fluoro modified nucleoside
  modified_base 18: mod_base = OTHER; note = 2'-O-methyl modified nucleoside
  modified_base 19: mod_base = OTHER; note = 2'-fluoro modified nucleoside with phosphorothioate linkage
  modified_base 20: mod_base = OTHER; note = 2'-O-methyl modified nucleoside with phosphorothioate linkage
  modified_base 21: mod_base = OTHER; note = 2'-O-methyl modified nucleoside
cttcctggaatcgatactatt

SEQ ID NO: 2288 - RNA, 21 nt, synthetic construct
  source 1..21: mol_type = other RNA
  modified_base 1: mod_base = OTHER; note = 2'-fluoro modified nucleoside with phosphorothioate linkage
  modified_base 2: mod_base = OTHER; note = 2'-O-methyl modified nucleoside with phosphorothioate linkage
  modified_base 3: mod_base = OTHER; note = 2'-fluoro modified nucleoside
  modified_base 4: mod_base = OTHER; note = 2'-O-methyl modified nucleoside
  modified_base 5: mod_base = OTHER; note = 2'-fluoro modified nucleoside
  modified_base 6: mod_base = OTHER; note = 2'-O-methyl modified nucleoside
  modified_base 7: mod_base = OTHER; note = 2'-fluoro modified nucleoside
  modified_base 8: mod_base = OTHER; note = 2'-O-methyl modified nucleoside
  modified_base 9: mod_base = OTHER; note = 2'-fluoro modified nucleoside
  modified_base 10: mod_base = OTHER; note = 2'-O-methyl modified nucleoside
  modified_base 11: mod_base = OTHER; note = 2'-fluoro modified nucleoside
  modified_base 12: mod_base = OTHER; note = 2'-O-methyl modified nucleoside
  modified_base 13: mod_base = OTHER; note = 2'-fluoro modified nucleoside
  modified_base 14: mod_base = OTHER; note = 2'-O-methyl modified nucleoside
  modified_base 15: mod_base = OTHER; note = 2'-fluoro modified nucleoside
  modified_base 16: mod_base = OTHER; note = 2'-O-methyl modified nucleoside
  modified_base 17: mod_base = OTHER; note = 2'-fluoro modified nucleoside
  modified_base 18: mod_base = OTHER; note = 2'-O-methyl modified nucleoside
  modified_base 19: mod_base = OTHER; note = 2'-fluoro modified nucleoside with phosphorothioate linkage
  modified_base 20: mod_base = OTHER; note = 2'-O-methyl modified nucleoside with phosphorothioate linkage
  modified_base 21: mod_base = OTHER; note = 2'-O-methyl modified nucleoside
ctggaatcgatacttgtaatt

SEQ ID NO: 2289 - RNA, 21 nt, synthetic construct
  source 1..21: mol_type = other RNA
  modified_base 1: mod_base = OTHER; note = 2'-fluoro modified nucleoside with phosphorothioate linkage
  modified_base 2: mod_base = OTHER; note = 2'-O-methyl modified nucleoside with phosphorothioate linkage
  modified_base 3: mod_base = OTHER; note = 2'-fluoro modified nucleoside
  modified_base 4: mod_base = OTHER; note = 2'-O-methyl modified nucleoside
  modified_base 5: mod_base = OTHER; note = 2'-fluoro modified nucleoside
  modified_base 6: mod_base = OTHER; note = 2'-O-methyl modified nucleoside
  modified_base 7: mod_base = OTHER; note = 2'-fluoro modified nucleoside
  modified_base 8: mod_base = OTHER; note = 2'-O-methyl modified nucleoside
  modified_base 9: mod_base = OTHER; note = 2'-fluoro modified nucleoside
  modified_base 10: mod_base = OTHER; note = 2'-O-methyl modified nucleoside
  modified_base 11: mod_base = OTHER; note = 2'-fluoro modified nucleoside
  modified_base 12: mod_base = OTHER; note = 2'-O-methyl modified nucleoside
  modified_base 13: mod_base = OTHER; note = 2'-fluoro modified nucleoside
  modified_base 14: mod_base = OTHER; note = 2'-O-methyl modified nucleoside
  modified_base 15: mod_base = OTHER; note = 2'-fluoro modified nucleoside
  modified_base 16: mod_base = OTHER; note = 2'-O-methyl modified nucleoside
  modified_base 17: mod_base = OTHER; note = 2'-fluoro modified nucleoside
  modified_base 18: mod_base = OTHER; note = 2'-O-methyl modified nucleoside
  modified_base 19: mod_base = OTHER; note = 2'-fluoro modified nucleoside with phosphorothioate linkage
  modified_base 20: mod_base = OTHER; note = 2'-O-methyl modified nucleoside with phosphorothioate linkage
  modified_base 21: mod_base = OTHER; note = 2'-O-methyl modified nucleoside
gaatcgatacttgtatttatt

SEQ ID NO: 2290 - RNA, 21 nt, synthetic construct
  source 1..21: mol_type = other RNA
  modified_base 1: mod_base = OTHER; note = 2'-fluoro modified nucleoside with phosphorothioate linkage
  modified_base 2: mod_base = OTHER; note = 2'-O-methyl modified nucleoside with phosphorothioate linkage
  modified_base 3: mod_base = OTHER; note = 2'-fluoro modified nucleoside
  modified_base 4: mod_base = OTHER; note = 2'-O-methyl modified nucleoside
  modified_base 5: mod_base = OTHER; note = 2'-fluoro modified nucleoside
  modified_base 6: mod_base = OTHER; note = 2'-O-methyl modified nucleoside
  modified_base 7: mod_base = OTHER; note = 2'-fluoro modified nucleoside
  modified_base 8: mod_base = OTHER; note = 2'-O-methyl modified nucleoside
  modified_base 9: mod_base = OTHER; note = 2'-fluoro modified nucleoside
  modified_base 10: mod_base = OTHER; note = 2'-O-methyl modified nucleoside
  modified_base 11: mod_base = OTHER; note = 2'-fluoro modified nucleoside
  modified_base 12: mod_base = OTHER; note = 2'-O-methyl modified nucleoside
  modified_base 13: mod_base = OTHER; note = 2'-fluoro modified nucleoside
  modified_base 14: mod_base = OTHER; note = 2'-O-methyl modified nucleoside
  modified_base 15: mod_base = OTHER; note = 2'-fluoro modified nucleoside
  modified_base 16: mod_base = OTHER; note = 2'-O-methyl modified nucleoside
  modified_base 17: mod_base = OTHER; note = 2'-fluoro modified nucleoside
  modified_base 18: mod_base = OTHER; note = 2'-O-methyl modified nucleoside
  modified_base 19: mod_base = OTHER; note = 2'-fluoro modified nucleoside with phosphorothioate linkage
  modified_base 20: mod_base = OTHER; note = 2'-O-methyl modified nucleoside with phosphorothioate linkage
  modified_base 21: mod_base = OTHER; note = 2'-O-methyl modified nucleoside
ctagtaccaagttacgtgatt

SEQ ID NO: 2291 - RNA, 21 nt, synthetic construct
  source 1..21: mol_type = other RNA
  modified_base 1: mod_base = OTHER; note = 2'-fluoro modified nucleoside with phosphorothioate linkage
  modified_base 2: mod_base = OTHER; note = 2'-O-methyl modified nucleoside with phosphorothioate linkage
  modified_base 3: mod_base = OTHER; note = 2'-fluoro modified nucleoside
  modified_base 4: mod_base = OTHER; note = 2'-O-methyl modified nucleoside
  modified_base 5: mod_base = OTHER; note = 2'-fluoro modified nucleoside
  modified_base 6: mod_base = OTHER; note = 2'-O-methyl modified nucleoside
  modified_base 7: mod_base = OTHER; note = 2'-fluoro modified nucleoside
  modified_base 8: mod_base = OTHER; note = 2'-O-methyl modified nucleoside
  modified_base 9: mod_base = OTHER; note = 2'-fluoro modified nucleoside
  modified_base 10: mod_base = OTHER; note = 2'-O-methyl modified nucleoside
  modified_base 11: mod_base = OTHER; note = 2'-fluoro modified nucleoside
  modified_base 12: mod_base = OTHER; note = 2'-O-methyl modified nucleoside
  modified_base 13: mod_base = OTHER; note = 2'-fluoro modified nucleoside
  modified_base 14: mod_base = OTHER; note = 2'-O-methyl modified nucleoside
  modified_base 15: mod_base = OTHER; note = 2'-fluoro modified nucleoside
  modified_base 16: mod_base = OTHER; note = 2'-O-methyl modified nucleoside
  modified_base 17: mod_base = OTHER; note = 2'-fluoro modified nucleoside
  modified_base 18: mod_base = OTHER; note = 2'-O-methyl modified nucleoside
  modified_base 19: mod_base = OTHER; note = 2'-fluoro modified nucleoside with phosphorothioate linkage
  modified_base 20: mod_base = OTHER; note = 2'-O-methyl modified nucleoside with phosphorothioate linkage
  modified_base 21: mod_base = OTHER; note = 2'-O-methyl modified nucleoside
tagtaccaagttacgtgcatt

SEQ ID NO: 2292 - RNA, 21 nt, synthetic construct
  source 1..21: mol_type = other RNA
  modified_base 1: mod_base = OTHER; note = 2'-fluoro modified nucleoside with phosphorothioate linkage
  modified_base 2: mod_base = OTHER; note = 2'-O-methyl modified nucleoside with phosphorothioate linkage
  modified_base 3: mod_base = OTHER; note = 2'-fluoro modified nucleoside
  modified_base 4: mod_base = OTHER; note = 2'-O-methyl modified nucleoside
  modified_base 5: mod_base = OTHER; note = 2'-fluoro modified nucleoside
  modified_base 6: mod_base = OTHER; note = 2'-O-methyl modified nucleoside
  modified_base 7: mod_base = OTHER; note = 2'-fluoro modified nucleoside
  modified_base 8: mod_base = OTHER; note = 2'-O-methyl modified nucleoside
  modified_base 9: mod_base = OTHER; note = 2'-fluoro modified nucleoside
  modified_base 10: mod_base = OTHER; note = 2'-O-methyl modified nucleoside
  modified_base 11: mod_base = OTHER; note = 2'-fluoro modified nucleoside
  modified_base 12: mod_base = OTHER; note = 2'-O-methyl modified nucleoside
  modified_base 13: mod_base = OTHER; note = 2'-fluoro modified nucleoside
  modified_base 14: mod_base = OTHER; note = 2'-O-methyl modified nucleoside
  modified_base 15: mod_base = OTHER; note = 2'-fluoro modified nucleoside
  modified_base 16: mod_base = OTHER; note = 2'-O-methyl modified nucleoside
  modified_base 17: mod_base = OTHER; note = 2'-fluoro modified nucleoside
  modified_base 18: mod_base = OTHER; note = 2'-O-methyl modified nucleoside
  modified_base 19: mod_base = OTHER; note = 2'-fluoro modified nucleoside with phosphorothioate linkage
  modified_base 20: mod_base = OTHER; note = 2'-O-methyl modified nucleoside with phosphorothioate linkage
  modified_base 21: mod_base = OTHER; note = 2'-O-methyl modified nucleoside
agtaccaagttacgtgcaatt

SEQ ID NO: 2293 - RNA, 21 nt, synthetic construct
  source 1..21: mol_type = other RNA
  modified_base 1: mod_base = OTHER; note = 2'-fluoro modified nucleoside with phosphorothioate linkage
  modified_base 2: mod_base = OTHER; note = 2'-O-methyl modified nucleoside with phosphorothioate linkage
  modified_base 3: mod_base = OTHER; note = 2'-fluoro modified nucleoside
  modified_base 4: mod_base = OTHER; note = 2'-O-methyl modified nucleoside
  modified_base 5: mod_base = OTHER; note = 2'-fluoro modified nucleoside
  modified_base 6: mod_base = OTHER; note = 2'-O-methyl modified nucleoside
  modified_base 7: mod_base = OTHER; note = 2'-fluoro modified nucleoside
  modified_base 8: mod_base = OTHER; note = 2'-O-methyl modified nucleoside
  modified_base 9: mod_base = OTHER; note = 2'-fluoro modified nucleoside
  modified_base 10: mod_base = OTHER; note = 2'-O-methyl modified nucleoside
  modified_base 11: mod_base = OTHER; note = 2'-fluoro modified nucleoside
  modified_base 12: mod_base = OTHER; note = 2'-O-methyl modified nucleoside
  modified_base 13: mod_base = OTHER; note = 2'-fluoro modified nucleoside
  modified_base 14: mod_base = OTHER; note = 2'-O-methyl modified nucleoside
  modified_base 15: mod_base = OTHER; note = 2'-fluoro modified nucleoside
  modified_base 16: mod_base = OTHER; note = 2'-O-methyl modified nucleoside
  modified_base 17: mod_base = OTHER; note = 2'-fluoro modified nucleoside
  modified_base 18: mod_base = OTHER; note = 2'-O-methyl modified nucleoside
  modified_base 19: mod_base = OTHER; note = 2'-fluoro modified nucleoside with phosphorothioate linkage
  modified_base 20: mod_base = OTHER; note = 2'-O-methyl modified nucleoside with phosphorothioate linkage
  modified_base 21: mod_base = OTHER; note = 2'-O-methyl modified nucleoside
gtaccaagttacgtgcacatt

SEQ ID NO: 2294 - RNA, 21 nt, synthetic construct
  source 1..21: mol_type = other RNA
  modified_base 1: mod_base = OTHER; note = 2'-fluoro modified nucleoside with phosphorothioate linkage
  modified_base 2: mod_base = OTHER; note = 2'-O-methyl modified nucleoside with phosphorothioate linkage
  modified_base 3: mod_base = OTHER; note = 2'-fluoro modified nucleoside
  modified_base 4: mod_base = OTHER; note = 2'-O-methyl modified nucleoside
  modified_base 5: mod_base = OTHER; note = 2'-fluoro modified nucleoside
  modified_base 6: mod_base = OTHER; note = 2'-O-methyl modified nucleoside
  modified_base 7: mod_base = OTHER; note = 2'-fluoro modified nucleoside
  modified_base 8: mod_base = OTHER; note = 2'-O-methyl modified nucleoside
  modified_base 9: mod_base = OTHER; note = 2'-fluoro modified nucleoside
  modified_base 10: mod_base = OTHER; note = 2'-O-methyl modified nucleoside
  modified_base 11: mod_base = OTHER; note = 2'-fluoro modified nucleoside
  modified_base 12: mod_base = OTHER; note = 2'-O-methyl modified nucleoside
  modified_base 13: mod_base = OTHER; note = 2'-fluoro modified nucleoside
  modified_base 14: mod_base = OTHER; note = 2'-O-methyl modified nucleoside
  modified_base 15: mod_base = OTHER; note = 2'-fluoro modified nucleoside
  modified_base 16: mod_base = OTHER; note = 2'-O-methyl modified nucleoside
  modified_base 17: mod_base = OTHER; note = 2'-fluoro modified nucleoside
  modified_base 18: mod_base = OTHER; note = 2'-O-methyl modified nucleoside
  modified_base 19: mod_base = OTHER; note = 2'-fluoro modified nucleoside with phosphorothioate linkage
  modified_base 20: mod_base = OTHER; note = 2'-O-methyl modified nucleoside with phosphorothioate linkage
  modified_base 21: mod_base = OTHER; note = 2'-O-methyl modified nucleoside
taccaagttacgtgcaccatt

SEQ ID NO: 2295 - RNA, 21 nt, synthetic construct
  source 1..21: mol_type = other RNA
  modified_base 1: mod_base = OTHER; note = 2'-fluoro modified nucleoside with phosphorothioate linkage
  modified_base 2: mod_base = OTHER; note = 2'-O-methyl modified nucleoside with phosphorothioate linkage
  modified_base 3: mod_base = OTHER; note = 2'-fluoro modified nucleoside
  modified_base 4: mod_base = OTHER; note = 2'-O-methyl modified nucleoside
  modified_base 5: mod_base = OTHER; note = 2'-fluoro modified nucleoside
  modified_base 6: mod_base = OTHER; note = 2'-O-methyl modified nucleoside
  modified_base 7: mod_base = OTHER; note = 2'-fluoro modified nucleoside
  modified_base 8: mod_base = OTHER; note = 2'-O-methyl modified nucleoside
  modified_base 9: mod_base = OTHER; note = 2'-fluoro modified nucleoside
  modified_base 10: mod_base = OTHER; note = 2'-O-methyl modified nucleoside
  modified_base 11: mod_base = OTHER; note = 2'-fluoro modified nucleoside
  modified_base 12: mod_base = OTHER; note = 2'-O-methyl modified nucleoside
  modified_base 13: mod_base = OTHER; note = 2'-fluoro modified nucleoside
  modified_base 14: mod_base = OTHER; note = 2'-O-methyl modified nucleoside
  modified_base 15: mod_base = OTHER; note = 2'-fluoro modified nucleoside
  modified_base 16: mod_base = OTHER; note = 2'-O-methyl modified nucleoside
  modified_base 17: mod_base = OTHER; note = 2'-fluoro modified nucleoside
  modified_base 18: mod_base = OTHER; note = 2'-O-methyl modified nucleoside
  modified_base 19: mod_base = OTHER; note = 2'-fluoro modified nucleoside with phosphorothioate linkage
  modified_base 20: mod_base = OTHER; note = 2'-O-methyl modified nucleoside with phosphorothioate linkage
  modified_base 21: mod_base = OTHER; note = 2'-O-methyl modified nucleoside
ccaagttacgtgcaccaaatt

SEQ ID NO: 2296 - RNA, 21 nt, synthetic construct
  source 1..21: mol_type = other RNA
  modified_base 1: mod_base = OTHER; note = 2'-fluoro modified nucleoside with phosphorothioate linkage
  modified_base 2: mod_base = OTHER; note = 2'-O-methyl modified nucleoside with phosphorothioate linkage
  modified_base 3: mod_base = OTHER; note = 2'-fluoro modified nucleoside
  modified_base 4: mod_base = OTHER; note = 2'-O-methyl modified nucleoside
  modified_base 5: mod_base = OTHER; note = 2'-fluoro modified nucleoside
  modified_base 6: mod_base = OTHER; note = 2'-O-methyl modified nucleoside
  modified_base 7: mod_base = OTHER; note = 2'-fluoro modified nucleoside
  modified_base 8: mod_base = OTHER; note = 2'-O-methyl modified nucleoside
  modified_base 9: mod_base = OTHER; note = 2'-fluoro modified nucleoside
  modified_base 10: mod_base = OTHER; note = 2'-O-methyl modified nucleoside
  modified_base 11: mod_base = OTHER; note = 2'-fluoro modified nucleoside
  modified_base 12: mod_base = OTHER; note = 2'-O-methyl modified nucleoside
  modified_base 13: mod_base = OTHER; note = 2'-fluoro modified nucleoside
  modified_base 14: mod_base = OTHER; note = 2'-O-methyl modified nucleoside
  modified_base 15: mod_base = OTHER; note = 2'-fluoro modified nucleoside
  modified_base 16: mod_base = OTHER; note = 2'-O-methyl modified nucleoside
  modified_base 17: mod_base = OTHER; note = 2'-fluoro modified nucleoside
  modified_base 18: mod_base = OTHER; note = 2'-O-methyl modified nucleoside
  modified_base 19: mod_base = OTHER; note = 2'-fluoro modified nucleoside with phosphorothioate linkage
  modified_base 20: mod_base = OTHER; note = 2'-O-methyl modified nucleoside with phosphorothioate linkage
  modified_base 21: mod_base = OTHER; note = 2'-O-methyl modified nucleoside
caagttacgtgcaccaaaatt

SEQ ID NO: 2297 - RNA, 21 nt, synthetic construct
  source 1..21: mol_type = other RNA
  modified_base 1: mod_base = OTHER; note = 2'-fluoro modified nucleoside with phosphorothioate linkage
  modified_base 2: mod_base = OTHER; note = 2'-O-methyl modified nucleoside with phosphorothioate linkage
  modified_base 3: mod_base = OTHER; note = 2'-fluoro modified nucleoside
  modified_base 4: mod_base = OTHER; note = 2'-O-methyl modified nucleoside
  modified_base 5: mod_base = OTHER; note = 2'-fluoro modified nucleoside
  modified_base 6: mod_base = OTHER; note = 2'-O-methyl modified nucleoside
  modified_base 7: mod_base = OTHER; note = 2'-fluoro modified nucleoside
  modified_base 8: mod_base = OTHER; note = 2'-O-methyl modified nucleoside
  modified_base 9: mod_base = OTHER; note = 2'-fluoro modified nucleoside
  modified_base 10: mod_base = OTHER; note = 2'-O-methyl modified nucleoside
  modified_base 11: mod_base = OTHER; note = 2'-fluoro modified nucleoside
  modified_base 12: mod_base = OTHER; note = 2'-O-methyl modified nucleoside
  modified_base 13: mod_base = OTHER; note = 2'-fluoro modified nucleoside
  modified_base 14: mod_base = OTHER; note = 2'-O-methyl modified nucleoside
  modified_base 15: mod_base = OTHER; note = 2'-fluoro modified nucleoside
  modified_base 16: mod_base = OTHER; note = 2'-O-methyl modified nucleoside
  modified_base 17: mod_base = OTHER; note = 2'-fluoro modified nucleoside
  modified_base 18: mod_base = OTHER; note = 2'-O-methyl modified nucleoside
  modified_base 19: mod_base = OTHER; note = 2'-fluoro modified nucleoside with phosphorothioate linkage
  modified_base 20: mod_base = OTHER; note = 2'-O-methyl modified nucleoside with phosphorothioate linkage
  modified_base 21: mod_base = OTHER; note = 2'-O-methyl modified nucleoside
aagttacgtgcaccaaatatt

SEQ ID NO: 2298 - RNA, 21 nt, synthetic construct
  source 1..21: mol_type = other RNA
  modified_base 1: mod_base = OTHER; note = 2'-fluoro modified nucleoside with phosphorothioate linkage
  modified_base 2: mod_base = OTHER; note = 2'-O-methyl modified nucleoside with phosphorothioate linkage
  modified_base 3: mod_base = OTHER; note = 2'-fluoro modified nucleoside
  modified_base 4: mod_base = OTHER; note = 2'-O-methyl modified nucleoside
  modified_base 5: mod_base = OTHER; note = 2'-fluoro modified nucleoside
  modified_base 6: mod_base = OTHER; note = 2'-O-methyl modified nucleoside
  modified_base 7: mod_base = OTHER; note = 2'-fluoro modified nucleoside
  modified_base 8: mod_base = OTHER; note = 2'-O-methyl modified nucleoside
  modified_base 9: mod_base = OTHER; note = 2'-fluoro modified nucleoside
  modified_base 10: mod_base = OTHER; note = 2'-O-methyl modified nucleoside
  modified_base 11: mod_base = OTHER; note = 2'-fluoro modified nucleoside
  modified_base 12: mod_base = OTHER; note = 2'-O-methyl modified nucleoside
  modified_base 13: mod_base = OTHER; note = 2'-fluoro modified nucleoside
  modified_base 14: mod_base = OTHER; note = 2'-O-methyl modified nucleoside
  modified_base 15: mod_base = OTHER; note = 2'-fluoro modified nucleoside
  modified_base 16: mod_base = OTHER; note = 2'-O-methyl modified nucleoside
  modified_base 17: mod_base = OTHER; note = 2'-fluoro modified nucleoside
  modified_base 18: mod_base = OTHER; note = 2'-O-methyl modified nucleoside
  modified_base 19: mod_base = OTHER; note = 2'-fluoro modified nucleoside with phosphorothioate linkage
  modified_base 20: mod_base = OTHER; note = 2'-O-methyl modified nucleoside with phosphorothioate linkage
  modified_base 21: mod_base = OTHER; note = 2'-O-methyl modified nucleoside
gttacgtgcaccaaattaatt

SEQ ID NO: 2299 - RNA, 21 nt, synthetic construct
  source 1..21: mol_type = other RNA
  modified_base 1: mod_base = OTHER; note = 2'-fluoro modified nucleoside with phosphorothioate linkage
  modified_base 2: mod_base = OTHER; note = 2'-O-methyl modified nucleoside with phosphorothioate linkage
  modified_base 3: mod_base = OTHER; note = 2'-fluoro modified nucleoside
  modified_base 4: mod_base = OTHER; note = 2'-O-methyl modified nucleoside
  modified_base 5: mod_base = OTHER; note = 2'-fluoro modified nucleoside
  modified_base 6: mod_base = OTHER; note = 2'-O-methyl modified nucleoside
  modified_base 7: mod_base = OTHER; note = 2'-fluoro modified nucleoside
  modified_base 8: mod_base = OTHER; note = 2'-O-methyl modified nucleoside
  modified_base 9: mod_base = OTHER; note = 2'-fluoro modified nucleoside
  modified_base 10: mod_base = OTHER; note = 2'-O-methyl modified nucleoside
  modified_base 11: mod_base = OTHER; note = 2'-fluoro modified nucleoside
  modified_base 12: mod_base = OTHER; note = 2'-O-methyl modified nucleoside
  modified_base 13: mod_base = OTHER; note = 2'-fluoro modified nucleoside
  modified_base 14: mod_base = OTHER; note = 2'-O-methyl modified nucleoside
  modified_base 15: mod_base = OTHER; note = 2'-fluoro modified nucleoside
  modified_base 16: mod_base = OTHER; note = 2'-O-methyl modified nucleoside
  modified_base 17: mod_base = OTHER; note = 2'-fluoro modified nucleoside
  modified_base 18: mod_base = OTHER; note = 2'-O-methyl modified nucleoside
  modified_base 19: mod_base = OTHER; note = 2'-fluoro modified nucleoside with phosphorothioate linkage
  modified_base 20: mod_base = OTHER; note = 2'-O-methyl modified nucleoside with phosphorothioate linkage
  modified_base 21: mod_base = OTHER; note = 2'-O-methyl modified nucleoside
ttacgtgcaccaaattatatt

SEQ ID NO: 2300 - RNA, 21 nt, synthetic construct
  source 1..21: mol_type = other RNA
  modified_base 1: mod_base = OTHER; note = 2'-fluoro modified nucleoside with phosphorothioate linkage
  modified_base 2: mod_base = OTHER; note = 2'-O-methyl modified nucleoside with phosphorothioate linkage
  modified_base 3: mod_base = OTHER; note = 2'-fluoro modified nucleoside
  modified_base 4: mod_base = OTHER; note = 2'-O-methyl modified nucleoside
  modified_base 5: mod_base = OTHER; note = 2'-fluoro modified nucleoside
  modified_base 6: mod_base = OTHER; note = 2'-O-methyl modified nucleoside
  modified_base 7: mod_base = OTHER; note = 2'-fluoro modified nucleoside
  modified_base 8: mod_base = OTHER; note = 2'-O-methyl modified nucleoside
  modified_base 9: mod_base = OTHER; note = 2'-fluoro modified nucleoside
  modified_base 10: mod_base = OTHER; note = 2'-O-methyl modified nucleoside
  modified_base 11: mod_base = OTHER; note = 2'-fluoro modified nucleoside
  modified_base 12: mod_base = OTHER; note = 2'-O-methyl modified nucleoside
  modified_base 13: mod_base = OTHER; note = 2'-fluoro modified nucleoside
  modified_base 14: mod_base = OTHER; note = 2'-O-methyl modified nucleoside
  modified_base 15: mod_base = OTHER; note = 2'-fluoro modified nucleoside
  modified_base 16: mod_base = OTHER; note = 2'-O-methyl modified nucleoside
  modified_base 17: mod_base = OTHER; note = 2'-fluoro modified nucleoside
  modified_base 18: mod_base = OTHER; note = 2'-O-methyl modified nucleoside
  modified_base 19: mod_base = OTHER; note = 2'-fluoro modified nucleoside with phosphorothioate linkage
  modified_base 20: mod_base = OTHER; note = 2'-O-methyl modified nucleoside with phosphorothioate linkage
  modified_base 21: mod_base = OTHER; note = 2'-O-methyl modified nucleoside
aagactcaaaagtaatatatt

SEQ ID NO: 2301 - RNA, 21 nt, synthetic construct
  source 1..21: mol_type = other RNA
  modified_base 1: mod_base = OTHER; note = 2'-fluoro modified nucleoside with phosphorothioate linkage
  modified_base 2: mod_base = OTHER; note = 2'-O-methyl modified nucleoside with phosphorothioate linkage
  modified_base 3: mod_base = OTHER; note = 2'-fluoro modified nucleoside
  modified_base 4: mod_base = OTHER; note = 2'-O-methyl modified nucleoside
  modified_base 5: mod_base = OTHER; note = 2'-fluoro modified nucleoside
  modified_base 6: mod_base = OTHER; note = 2'-O-methyl modified nucleoside
  modified_base 7: mod_base = OTHER; note = 2'-fluoro modified nucleoside
  modified_base 8: mod_base = OTHER; note = 2'-O-methyl modified nucleoside
  modified_base 9: mod_base = OTHER; note = 2'-fluoro modified nucleoside
  modified_base 10: mod_base = OTHER; note = 2'-O-methyl modified nucleoside
  modified_base 11: mod_base = OTHER; note = 2'-fluoro modified nucleoside
  modified_base 12: mod_base = OTHER; note = 2'-O-methyl modified nucleoside
  modified_base 13: mod_base = OTHER; note = 2'-fluoro modified nucleoside
  modified_base 14: mod_base = OTHER; note = 2'-O-methyl modified nucleoside
  modified_base 15: mod_base = OTHER; note = 2'-fluoro modified nucleoside
  modified_base 16: mod_base = OTHER; note = 2'-O-methyl modified nucleoside
  modified_base 17: mod_base = OTHER; note = 2'-fluoro modified nucleoside
  modified_base 18: mod_base = OTHER; note = 2'-O-methyl modified nucleoside
  modified_base 19: mod_base = OTHER; note = 2'-fluoro modified nucleoside with phosphorothioate linkage
  modified_base 20: mod_base = OTHER; note = 2'-O-methyl modified nucleoside with phosphorothioate linkage
  modified_base 21: mod_base = OTHER; note = 2'-O-methyl modified nucleoside
aaaatctactaaaaagtcatt

SEQ ID NO: 2302 - RNA, 21 nt, synthetic construct
  source 1..21: mol_type = other RNA
  modified_base 1: mod_base = OTHER; note = 2'-fluoro modified nucleoside with phosphorothioate linkage
  modified_base 2: mod_base = OTHER; note = 2'-O-methyl modified nucleoside with phosphorothioate linkage
  modified_base 3: mod_base = OTHER; note = 2'-fluoro modified nucleoside
  modified_base 4: mod_base = OTHER; note = 2'-O-methyl modified nucleoside
  modified_base 5: mod_base = OTHER; note = 2'-fluoro modified nucleoside
  modified_base 6: mod_base = OTHER; note = 2'-O-methyl modified nucleoside
  modified_base 7: mod_base = OTHER; note = 2'-fluoro modified nucleoside
  modified_base 8: mod_base = OTHER; note = 2'-O-methyl modified nucleoside
  modified_base 9: mod_base = OTHER; note = 2'-fluoro modified nucleoside
  modified_base 10: mod_base = OTHER; note = 2'-O-methyl modified nucleoside
  modified_base 11: mod_base = OTHER; note = 2'-fluoro modified nucleoside
  modified_base 12: mod_base = OTHER; note = 2'-O-methyl modified nucleoside
  modified_base 13: mod_base = OTHER; note = 2'-fluoro modified nucleoside
  modified_base 14: mod_base = OTHER; note = 2'-O-methyl modified nucleoside
  modified_base 15: mod_base = OTHER; note = 2'-fluoro modified nucleoside
  modified_base 16: mod_base = OTHER; note = 2'-O-methyl modified nucleoside
  modified_base 17: mod_base = OTHER; note = 2'-fluoro modified nucleoside
  modified_base 18: mod_base = OTHER; note = 2'-O-methyl modified nucleoside
  modified_base 19: mod_base = OTHER; note = 2'-fluoro modified nucleoside with phosphorothioate linkage
  modified_base 20: mod_base = OTHER; note = 2'-O-methyl modified nucleoside with phosphorothioate linkage
  modified_base 21: mod_base = OTHER; note = 2'-O-methyl modified nucleoside
tctactaaaaagtctctgatt

SEQ ID NO: 2303 - RNA, 21 nt, synthetic construct
  source 1..21: mol_type = other RNA
  modified_base 1: mod_base = OTHER; note = 2'-fluoro modified nucleoside with phosphorothioate linkage
  modified_base 2: mod_base = OTHER; note = 2'-O-methyl modified nucleoside with phosphorothioate linkage
  modified_base 3: mod_base = OTHER; note = 2'-fluoro modified nucleoside
  modified_base 4: mod_base = OTHER; note = 2'-O-methyl modified nucleoside
  modified_base 5: mod_base = OTHER; note = 2'-fluoro modified nucleoside
  modified_base 6: mod_base = OTHER; note = 2'-O-methyl modified nucleoside
  modified_base 7: mod_base = OTHER; note = 2'-fluoro modified nucleoside
  modified_base 8: mod_base = OTHER; note = 2'-O-methyl modified nucleoside
  modified_base 9: mod_base = OTHER; note = 2'-fluoro modified nucleoside
  modified_base 10: mod_base = OTHER; note = 2'-O-methyl modified nucleoside
  modified_base 11: mod_base = OTHER; note = 2'-fluoro modified nucleoside
  modified_base 12: mod_base = OTHER; note = 2'-O-methyl modified nucleoside
  modified_base 13: mod_base = OTHER; note = 2'-fluoro modified nucleoside
  modified_base 14: mod_base = OTHER; note = 2'-O-methyl modified nucleoside
  modified_base 15: mod_base = OTHER; note = 2'-fluoro modified nucleoside
  modified_base 16: mod_base = OTHER; note = 2'-O-methyl modified nucleoside
  modified_base 17: mod_base = OTHER; note = 2'-fluoro modified nucleoside
  modified_base 18: mod_base = OTHER; note = 2'-O-methyl modified nucleoside
  modified_base 19: mod_base = OTHER; note = 2'-fluoro modified nucleoside with phosphorothioate linkage
  modified_base 20: mod_base = OTHER; note = 2'-O-methyl modified nucleoside with phosphorothioate linkage
  modified_base 21: mod_base = OTHER; note = 2'-O-methyl modified nucleoside
tgaagacggggctagataatt

SEQ ID NO: 2304 - RNA, 21 nt, synthetic construct
  source 1..21: mol_type = other RNA
  modified_base 1: mod_base = OTHER; note = 2'-fluoro modified nucleoside with phosphorothioate linkage
  modified_base 2: mod_base = OTHER; note = 2'-O-methyl modified nucleoside with phosphorothioate linkage
  modified_base 3: mod_base = OTHER; note = 2'-fluoro modified nucleoside
  modified_base 4: mod_base = OTHER; note = 2'-O-methyl modified nucleoside
  modified_base 5: mod_base = OTHER; note = 2'-fluoro modified nucleoside
  modified_base 6: mod_base = OTHER; note = 2'-O-methyl modified nucleoside
  modified_base 7: mod_base = OTHER; note = 2'-fluoro modified nucleoside
  modified_base 8: mod_base = OTHER; note = 2'-O-methyl modified nucleoside
  modified_base 9: mod_base = OTHER; note = 2'-fluoro modified nucleoside
  modified_base 10: mod_base = OTHER; note = 2'-O-methyl modified nucleoside
  modified_base 11: mod_base = OTHER; note = 2'-fluoro modified nucleoside
  modified_base 12: mod_base = OTHER; note = 2'-O-methyl modified nucleoside
  modified_base 13: mod_base = OTHER; note = 2'-fluoro modified nucleoside
  modified_base 14: mod_base = OTHER; note = 2'-O-methyl modified nucleoside
  modified_base 15: mod_base = OTHER; note = 2'-fluoro modified nucleoside
  modified_base 16: mod_base = OTHER; note = 2'-O-methyl modified nucleoside
  modified_base 17: mod_base = OTHER; note = 2'-fluoro modified nucleoside
  modified_base 18: mod_base = OTHER; note = 2'-O-methyl modified nucleoside
  modified_base 19: mod_base = OTHER; note = 2'-fluoro modified nucleoside with phosphorothioate linkage
  modified_base 20: mod_base = OTHER; note = 2'-O-methyl modified nucleoside with phosphorothioate linkage
  modified_base 21: mod_base = OTHER; note = 2'-O-methyl modified nucleoside
ctagatattgggagaaacatt

SEQ ID NO: 2305 - RNA, 21 nt, synthetic construct
  source 1..21: mol_type = other RNA
  modified_base 1: mod_base = OTHER; note = 2'-fluoro modified nucleoside with phosphorothioate linkage
  modified_base 2: mod_base = OTHER; note = 2'-O-methyl modified nucleoside with phosphorothioate linkage
  modified_base 3: mod_base = OTHER; note = 2'-fluoro modified nucleoside
  modified_base 4: mod_base = OTHER; note = 2'-O-methyl modified nucleoside
  modified_base 5: mod_base = OTHER; note = 2'-fluoro modified nucleoside
  modified_base 6: mod_base = OTHER; note = 2'-O-methyl modified nucleoside
  modified_base 7: mod_base = OTHER; note = 2'-fluoro modified nucleoside
  modified_base 8: mod_base = OTHER; note = 2'-O-methyl modified nucleoside
  modified_base 9: mod_base = OTHER; note = 2'-fluoro modified nucleoside
  modified_base 10: mod_base = OTHER; note = 2'-O-methyl modified nucleoside
  modified_base 11: mod_base = OTHER; note = 2'-fluoro modified nucleoside
  modified_base 12: mod_base = OTHER; note = 2'-O-methyl modified nucleoside
  modified_base 13: mod_base = OTHER; note = 2'-fluoro modified nucleoside
  modified_base 14: mod_base = OTHER; note = 2'-O-methyl modified nucleoside
  modified_base 15: mod_base = OTHER; note = 2'-fluoro modified nucleoside
  modified_base 16: mod_base = OTHER; note = 2'-O-methyl modified nucleoside
  modified_base 17: mod_base = OTHER; note = 2'-fluoro modified nucleoside
  modified_base 18: mod_base = OTHER; note = 2'-O-methyl modified nucleoside
  modified_base 19: mod_base = OTHER; note = 2'-fluoro modified nucleoside with phosphorothioate linkage
  modified_base 20: mod_base = OTHER; note = 2'-O-methyl modified nucleoside with phosphorothioate linkage
  modified_base 21: mod_base = OTHER; note = 2'-O-methyl modified nucleoside
agcagaacggtgaaagtgatt

SEQ ID NO: 2306 - RNA, 21 nt, synthetic construct
  source 1..21: mol_type = other RNA
  modified_base 1: mod_base = OTHER; note = 2'-fluoro modified nucleoside with phosphorothioate linkage
  modified_base 2: mod_base = OTHER; note = 2'-O-methyl modified nucleoside with phosphorothioate linkage
  modified_base 3: mod_base = OTHER; note = 2'-fluoro modified nucleoside
  modified_base 4: mod_base = OTHER; note = 2'-O-methyl modified nucleoside
  modified_base 5: mod_base = OTHER; note = 2'-fluoro modified nucleoside
  modified_base 6: mod_base = OTHER; note = 2'-O-methyl modified nucleoside
  modified_base 7: mod_base = OTHER; note = 2'-fluoro modified nucleoside
  modified_base 8: mod_base = OTHER; note = 2'-O-methyl modified nucleoside
  modified_base 9: mod_base = OTHER; note = 2'-fluoro modified nucleoside
  modified_base 10: mod_base = OTHER; note = 2'-O-methyl modified nucleoside
  modified_base 11: mod_base = OTHER; note = 2'-fluoro modified nucleoside
  modified_base 12: mod_base = OTHER; note = 2'-O-methyl modified nucleoside
  modified_base 13: mod_base = OTHER; note = 2'-fluoro modified nucleoside
  modified_base 14: mod_base = OTHER; note = 2'-O-methyl modified nucleoside
  modified_base 15: mod_base = OTHER; note = 2'-fluoro modified nucleoside
  modified_base 16: mod_base = OTHER; note = 2'-O-methyl modified nucleoside
  modified_base 17: mod_base = OTHER; note = 2'-fluoro modified nucleoside
  modified_base 18: mod_base = OTHER; note = 2'-O-methyl modified nucleoside
  modified_base 19: mod_base = OTHER; note = 2'-fluoro modified nucleoside with phosphorothioate linkage
  modified_base 20: mod_base = OTHER; note = 2'-O-methyl modified nucleoside with phosphorothioate linkage
  modified_base 21: mod_base = OTHER; note = 2'-O-methyl modified nucleoside
aaagtgggagatacattgatt

SEQ ID NO: 2307 - RNA, 21 nt, synthetic construct
  source 1..21: mol_type = other RNA
  modified_base 1: mod_base = OTHER; note = 2'-fluoro modified nucleoside with phosphorothioate linkage
  modified_base 2: mod_base = OTHER; note = 2'-O-methyl modified nucleoside with phosphorothioate linkage
  modified_base 3: mod_base = OTHER; note = 2'-fluoro modified nucleoside
  modified_base 4: mod_base = OTHER; note = 2'-O-methyl modified nucleoside
  modified_base 5: mod_base = OTHER; note = 2'-fluoro modified nucleoside
  modified_base 6: mod_base = OTHER; note = 2'-O-methyl modified nucleoside
  modified_base 7: mod_base = OTHER; note = 2'-fluoro modified nucleoside
  modified_base 8: mod_base = OTHER; note = 2'-O-methyl modified nucleoside
  modified_base 9: mod_base = OTHER; note = 2'-fluoro modified nucleoside
  modified_base 10: mod_base = OTHER; note = 2'-O-methyl modified nucleoside
  modified_base 11: mod_base = OTHER; note = 2'-fluoro modified nucleoside
  modified_base 12: mod_base = OTHER; note = 2'-O-methyl modified nucleoside
  modified_base 13: mod_base = OTHER; note = 2'-fluoro modified nucleoside
  modified_base 14: mod_base = OTHER; note = 2'-O-methyl modified nucleoside
  modified_base 15: mod_base = OTHER; note = 2'-fluoro modified nucleoside
  modified_base 16: mod_base = OTHER; note = 2'-O-methyl modified nucleoside
  modified_base 17: mod_base = OTHER; note = 2'-fluoro modified nucleoside
  modified_base 18: mod_base = OTHER; note = 2'-O-methyl modified nucleoside
  modified_base 19: mod_base = OTHER; note = 2'-fluoro modified nucleoside with phosphorothioate linkage
  modified_base 20: mod_base = OTHER; note = 2'-O-methyl modified nucleoside with phosphorothioate linkage
  modified_base 21: mod_base = OTHER; note = 2'-O-methyl modified nucleoside
aagtgggagatacattggatt

SEQ ID NO: 2308 - RNA, 21 nt, synthetic construct
  source 1..21: mol_type = other RNA
  modified_base 1: mod_base = OTHER; note = 2'-fluoro modified nucleoside with phosphorothioate linkage
  modified_base 2: mod_base = OTHER; note = 2'-O-methyl modified nucleoside with phosphorothioate linkage
  modified_base 3: mod_base = OTHER; note = 2'-fluoro modified nucleoside
  modified_base 4: mod_base = OTHER; note = 2'-O-methyl modified nucleoside
  modified_base 5: mod_base = OTHER; note = 2'-fluoro modified nucleoside
  modified_base 6: mod_base = OTHER; note = 2'-O-methyl modified nucleoside
  modified_base 7: mod_base = OTHER; note = 2'-fluoro modified nucleoside
  modified_base 8: mod_base = OTHER; note = 2'-O-methyl modified nucleoside
  modified_base 9: mod_base = OTHER; note = 2'-fluoro modified nucleoside
  modified_base 10: mod_base = OTHER; note = 2'-O-methyl modified nucleoside
  modified_base 11: mod_base = OTHER; note = 2'-fluoro modified nucleoside
  modified_base 12: mod_base = OTHER; note = 2'-O-methyl modified nucleoside
  modified_base 13: mod_base = OTHER; note = 2'-fluoro modified nucleoside
  modified_base 14: mod_base = OTHER; note = 2'-O-methyl modified nucleoside
  modified_base 15: mod_base = OTHER; note = 2'-fluoro modified nucleoside
  modified_base 16: mod_base = OTHER; note = 2'-O-methyl modified nucleoside
  modified_base 17: mod_base = OTHER; note = 2'-fluoro modified nucleoside
  modified_base 18: mod_base = OTHER; note = 2'-O-methyl modified nucleoside
  modified_base 19: mod_base = OTHER; note = 2'-fluoro modified nucleoside with phosphorothioate linkage
  modified_base 20: mod_base = OTHER; note = 2'-O-methyl modified nucleoside with phosphorothioate linkage
  modified_base 21: mod_base = OTHER; note = 2'-O-methyl modified nucleoside
agtgggagatacattggaatt

SEQ ID NO: 2309 - RNA, 21 nt, synthetic construct
  source 1..21: mol_type = other RNA
  modified_base 1: mod_base = OTHER; note = 2'-fluoro modified nucleoside with phosphorothioate linkage
  modified_base 2: mod_base = OTHER; note = 2'-O-methyl modified nucleoside with phosphorothioate linkage
  modified_base 3: mod_base = OTHER; note = 2'-fluoro modified nucleoside
  modified_base 4: mod_base = OTHER; note = 2'-O-methyl modified nucleoside
  modified_base 5: mod_base = OTHER; note = 2'-fluoro modified nucleoside
  modified_base 6: mod_base = OTHER; note = 2'-O-methyl modified nucleoside
  modified_base 7: mod_base = OTHER; note = 2'-fluoro modified nucleoside
  modified_base 8: mod_base = OTHER; note = 2'-O-methyl modified nucleoside
  modified_base 9: mod_base = OTHER; note = 2'-fluoro modified nucleoside
  modified_base 10: mod_base = OTHER; note = 2'-O-methyl modified nucleoside
  modified_base 11: mod_base = OTHER; note = 2'-fluoro modified nucleoside
  modified_base 12: mod_base = OTHER; note = 2'-O-methyl modified nucleoside
  modified_base 13: mod_base = OTHER; note = 2'-fluoro modified nucleoside
  modified_base 14: mod_base = OTHER; note = 2'-O-methyl modified nucleoside
  modified_base 15: mod_base = OTHER; note = 2'-fluoro modified nucleoside
  modified_base 16: mod_base = OTHER; note = 2'-O-methyl modified nucleoside
  modified_base 17: mod_base = OTHER; note = 2'-fluoro modified nucleoside
  modified_base 18: mod_base = OTHER; note = 2'-O-methyl modified nucleoside
  modified_base 19: mod_base = OTHER; note = 2'-fluoro modified nucleoside with phosphorothioate linkage
  modified_base 20: mod_base = OTHER; note = 2'-O-methyl modified nucleoside with phosphorothioate linkage
  modified_base 21: mod_base = OTHER; note = 2'-O-methyl modified nucleoside
tgggagatacattggatcatt

SEQ ID NO: 2310 - RNA, 21 nt, synthetic construct
  source 1..21: mol_type = other RNA
  modified_base 1: mod_base = OTHER; note = 2'-fluoro modified nucleoside with phosphorothioate linkage
  modified_base 2: mod_base = OTHER; note = 2'-O-methyl modified nucleoside with phosphorothioate linkage
  modified_base 3: mod_base = OTHER; note = 2'-fluoro modified nucleoside
  modified_base 4: mod_base = OTHER; note = 2'-O-methyl modified nucleoside
  modified_base 5: mod_base = OTHER; note = 2'-fluoro modified nucleoside
  modified_base 6: mod_base = OTHER; note = 2'-O-methyl modified nucleoside
  modified_base 7: mod_base = OTHER; note = 2'-fluoro modified nucleoside
  modified_base 8: mod_base = OTHER; note = 2'-O-methyl modified nucleoside
  modified_base 9: mod_base = OTHER; note = 2'-fluoro modified nucleoside
  modified_base 10: mod_base = OTHER; note = 2'-O-methyl modified nucleoside
  modified_base 11: mod_base = OTHER; note = 2'-fluoro modified nucleoside
  modified_base 12: mod_base = OTHER; note = 2'-O-methyl modified nucleoside
  modified_base 13: mod_base = OTHER; note = 2'-fluoro modified nucleoside
  modified_base 14: mod_base = OTHER; note = 2'-O-methyl modified nucleoside
  modified_base 15: mod_base = OTHER; note = 2'-fluoro modified nucleoside
  modified_base 16: mod_base = OTHER; note = 2'-O-methyl modified nucleoside
  modified_base 17: mod_base = OTHER; note = 2'-fluoro modified nucleoside
  modified_base 18: mod_base = OTHER; note = 2'-O-methyl modified nucleoside
  modified_base 19: mod_base = OTHER; note = 2'-fluoro modified nucleoside with phosphorothioate linkage
  modified_base 20: mod_base = OTHER; note = 2'-O-methyl modified nucleoside with phosphorothioate linkage
  modified_base 21: mod_base = OTHER; note = 2'-O-methyl modified nucleoside
atacattggatcttctcaatt

SEQ ID NO: 2311 - RNA, 21 nt, synthetic construct
  source 1..21: mol_type = other RNA
  modified_base 1: mod_base = OTHER; note = 2'-fluoro modified nucleoside with phosphorothioate linkage
  modified_base 2: mod_base = OTHER; note = 2'-O-methyl modified nucleoside with phosphorothioate linkage
  modified_base 3: mod_base = OTHER; note = 2'-fluoro modified nucleoside
  modified_base 4: mod_base = OTHER; note = 2'-O-methyl modified nucleoside
  modified_base 5: mod_base = OTHER; note = 2'-fluoro modified nucleoside
  modified_base 6: mod_base = OTHER; note = 2'-O-methyl modified nucleoside
  modified_base 7: mod_base = OTHER; note = 2'-fluoro modified nucleoside
  modified_base 8: mod_base = OTHER; note = 2'-O-methyl modified nucleoside
  modified_base 9: mod_base = OTHER; note = 2'-fluoro modified nucleoside
  modified_base 10: mod_base = OTHER; note = 2'-O-methyl modified nucleoside
  modified_base 11: mod_base = OTHER; note = 2'-fluoro modified nucleoside
  modified_base 12: mod_base = OTHER; note = 2'-O-methyl modified nucleoside
  modified_base 13: mod_base = OTHER; note = 2'-fluoro modified nucleoside
  modified_base 14: mod_base = OTHER; note = 2'-O-methyl modified nucleoside
  modified_base 15: mod_base = OTHER; note = 2'-fluoro modified nucleoside
  modified_base 16: mod_base = OTHER; note = 2'-O-methyl modified nucleoside
  modified_base 17: mod_base = OTHER; note = 2'-fluoro modified nucleoside
  modified_base 18: mod_base = OTHER; note = 2'-O-methyl modified nucleoside
  modified_base 19: mod_base = OTHER; note = 2'-fluoro modified nucleoside with phosphorothioate linkage
  modified_base 20: mod_base = OTHER; note = 2'-O-methyl modified nucleoside with phosphorothioate linkage
  modified_base 21: mod_base = OTHER; note = 2'-O-methyl modified nucleoside
cattggatcttctcattgatt

SEQ ID NO: 2312 - RNA, 21 nt, synthetic construct
  source 1..21: mol_type = other RNA
  modified_base 1: mod_base = OTHER; note = 2'-fluoro modified nucleoside with phosphorothioate linkage
  modified_base 2: mod_base = OTHER; note = 2'-O-methyl modified nucleoside with phosphorothioate linkage
  modified_base 3: mod_base = OTHER; note = 2'-fluoro modified nucleoside
  modified_base 4: mod_base = OTHER; note = 2'-O-methyl modified nucleoside
  modified_base 5: mod_base = OTHER; note = 2'-fluoro modified nucleoside
  modified_base 6: mod_base = OTHER; note = 2'-O-methyl modified nucleoside
  modified_base 7: mod_base = OTHER; note = 2'-fluoro modified nucleoside
  modified_base 8: mod_base = OTHER; note = 2'-O-methyl modified nucleoside
  modified_base 9: mod_base = OTHER; note = 2'-fluoro modified nucleoside
  modified_base 10: mod_base = OTHER; note = 2'-O-methyl modified nucleoside
  modified_base 11: mod_base = OTHER; note = 2'-fluoro modified nucleoside
  modified_base 12: mod_base = OTHER; note = 2'-O-methyl modified nucleoside
  modified_base 13: mod_base = OTHER; note = 2'-fluoro modified nucleoside
  modified_base 14: mod_base = OTHER; note = 2'-O-methyl modified nucleoside
  modified_base 15: mod_base = OTHER; note = 2'-fluoro modified nucleoside
  modified_base 16: mod_base = OTHER; note = 2'-O-methyl modified nucleoside
  modified_base 17: mod_base = OTHER; note = 2'-fluoro modified nucleoside
  modified_base 18: mod_base = OTHER; note = 2'-O-methyl modified nucleoside
  modified_base 19: mod_base = OTHER; note = 2'-fluoro modified nucleoside with phosphorothioate linkage
  modified_base 20: mod_base = OTHER; note = 2'-O-methyl modified nucleoside with phosphorothioate linkage
  modified_base 21: mod_base = OTHER; note = 2'-O-methyl modified nucleoside
attggatcttctcattggatt

SEQ ID NO: 2313 - RNA, 21 nt, synthetic construct
  source 1..21: mol_type = other RNA
  modified_base 1: mod_base = OTHER; note = 2'-fluoro modified nucleoside with phosphorothioate linkage
  modified_base 2: mod_base = OTHER; note = 2'-O-methyl modified nucleoside with phosphorothioate linkage
  modified_base 3: mod_base = OTHER; note = 2'-fluoro modified nucleoside
  modified_base 4: mod_base = OTHER; note = 2'-O-methyl modified nucleoside
  modified_base 5: mod_base = OTHER; note = 2'-fluoro modified nucleoside
  modified_base 6: mod_base = OTHER; note = 2'-O-methyl modified nucleoside
  modified_base 7: mod_base = OTHER; note = 2'-fluoro modified nucleoside
  modified_base 8: mod_base = OTHER; note = 2'-O-methyl modified nucleoside
  modified_base 9: mod_base = OTHER; note = 2'-fluoro modified nucleoside
  modified_base 10: mod_base = OTHER; note = 2'-O-methyl modified nucleoside
  modified_base 11: mod_base = OTHER; note = 2'-fluoro modified nucleoside
  modified_base 12: mod_base = OTHER; note = 2'-O-methyl modified nucleoside
  modified_base 13: mod_base = OTHER; note = 2'-fluoro modified nucleoside
  modified_base 14: mod_base = OTHER; note = 2'-O-methyl modified nucleoside
  modified_base 15: mod_base = OTHER; note = 2'-fluoro modified nucleoside
  modified_base 16: mod_base = OTHER; note = 2'-O-methyl modified nucleoside
  modified_base 17: mod_base = OTHER; note = 2'-fluoro modified nucleoside
  modified_base 18: mod_base = OTHER; note = 2'-O-methyl modified nucleoside
  modified_base 19: mod_base = OTHER; note = 2'-fluoro modified nucleoside with phosphorothioate linkage
  modified_base 20: mod_base = OTHER; note = 2'-O-methyl modified nucleoside with phosphorothioate linkage
  modified_base 21: mod_base = OTHER; note = 2'-O-methyl modified nucleoside
ttggatcttctcattggaatt

SEQ ID NO: 2314 - RNA, 21 nt, synthetic construct
  source 1..21: mol_type = other RNA
  modified_base 1: mod_base = OTHER; note = 2'-fluoro modified nucleoside with phosphorothioate linkage
  modified_base 2: mod_base = OTHER; note = 2'-O-methyl modified nucleoside with phosphorothioate linkage
  modified_base 3: mod_base = OTHER; note = 2'-fluoro modified nucleoside
  modified_base 4: mod_base = OTHER; note = 2'-O-methyl modified nucleoside
  modified_base 5: mod_base = OTHER; note = 2'-fluoro modified nucleoside
  modified_base 6: mod_base = OTHER; note = 2'-O-methyl modified nucleoside
  modified_base 7: mod_base = OTHER; note = 2'-fluoro modified nucleoside
  modified_base 8: mod_base = OTHER; note = 2'-O-methyl modified nucleoside
  modified_base 9: mod_base = OTHER; note = 2'-fluoro modified nucleoside
  modified_base 10: mod_base = OTHER; note = 2'-O-methyl modified nucleoside
  modified_base 11: mod_base = OTHER; note = 2'-fluoro modified nucleoside
  modified_base 12: mod_base = OTHER; note = 2'-O-methyl modified nucleoside
  modified_base 13: mod_base = OTHER; note = 2'-fluoro modified nucleoside
  modified_base 14: mod_base = OTHER; note = 2'-O-methyl modified nucleoside
  modified_base 15: mod_base = OTHER; note = 2'-fluoro modified nucleoside
  modified_base 16: mod_base = OTHER; note = 2'-O-methyl modified nucleoside
  modified_base 17: mod_base = OTHER; note = 2'-fluoro modified nucleoside
  modified_base 18: mod_base = OTHER; note = 2'-O-methyl modified nucleoside
  modified_base 19: mod_base = OTHER; note = 2'-fluoro modified nucleoside with phosphorothioate linkage
  modified_base 20: mod_base = OTHER; note = 2'-O-methyl modified nucleoside with phosphorothioate linkage
  modified_base 21: mod_base = OTHER; note = 2'-O-methyl modified nucleoside
tggatcttctcattggagatt

SEQ ID NO: 2315 - RNA, 21 nt, synthetic construct
  source 1..21: mol_type = other RNA
  modified_base 1: mod_base = OTHER; note = 2'-fluoro modified nucleoside with phosphorothioate linkage
  modified_base 2: mod_base = OTHER; note = 2'-O-methyl modified nucleoside with phosphorothioate linkage
  modified_base 3: mod_base = OTHER; note = 2'-fluoro modified nucleoside
  modified_base 4: mod_base = OTHER; note = 2'-O-methyl modified nucleoside
  modified_base 5: mod_base = OTHER; note = 2'-fluoro modified nucleoside
  modified_base 6: mod_base = OTHER; note = 2'-O-methyl modified nucleoside
  modified_base 7: mod_base = OTHER; note = 2'-fluoro modified nucleoside
  modified_base 8: mod_base = OTHER; note = 2'-O-methyl modified nucleoside
  modified_base 9: mod_base = OTHER; note = 2'-fluoro modified nucleoside
  modified_base 10: mod_base = OTHER; note = 2'-O-methyl modified nucleoside
  modified_base 11: mod_base = OTHER; note = 2'-fluoro modified nucleoside
  modified_base 12: mod_base = OTHER; note = 2'-O-methyl modified nucleoside
  modified_base 13: mod_base = OTHER; note = 2'-fluoro modified nucleoside
  modified_base 14: mod_base = OTHER; note = 2'-O-methyl modified nucleoside
  modified_base 15: mod_base = OTHER; note = 2'-fluoro modified nucleoside
  modified_base 16: mod_base = OTHER; note = 2'-O-methyl modified nucleoside
  modified_base 17: mod_base = OTHER; note = 2'-fluoro modified nucleoside
  modified_base 18: mod_base = OTHER; note = 2'-O-methyl modified nucleoside
  modified_base 19: mod_base = OTHER; note = 2'-fluoro modified nucleoside with phosphorothioate linkage
  modified_base 20: mod_base = OTHER; note = 2'-O-methyl modified nucleoside with phosphorothioate linkage
  modified_base 21: mod_base = OTHER; note = 2'-O-methyl modified nucleoside
gatcttctcattggagagatt

SEQ ID NO: 2316 - RNA, 21 nt, synthetic construct
  source 1..21: mol_type = other RNA
  modified_base 1: mod_base = OTHER; note = 2'-fluoro modified nucleoside with phosphorothioate linkage
  modified_base 2: mod_base = OTHER; note = 2'-O-methyl modified nucleoside with phosphorothioate linkage
  modified_base 3: mod_base = OTHER; note = 2'-fluoro modified nucleoside
  modified_base 4: mod_base = OTHER; note = 2'-O-methyl modified nucleoside
  modified_base 5: mod_base = OTHER; note = 2'-fluoro modified nucleoside
  modified_base 6: mod_base = OTHER; note = 2'-O-methyl modified nucleoside
  modified_base 7: mod_base = OTHER; note = 2'-fluoro modified nucleoside
  modified_base 8: mod_base = OTHER; note = 2'-O-methyl modified nucleoside
  modified_base 9: mod_base = OTHER; note = 2'-fluoro modified nucleoside
  modified_base 10: mod_base = OTHER; note = 2'-O-methyl modified nucleoside
  modified_base 11: mod_base = OTHER; note = 2'-fluoro modified nucleoside
  modified_base 12: mod_base = OTHER; note = 2'-O-methyl modified nucleoside
  modified_base 13: mod_base = OTHER; note = 2'-fluoro modified nucleoside
  modified_base 14: mod_base = OTHER; note = 2'-O-methyl modified nucleoside
  modified_base 15: mod_base = OTHER; note = 2'-fluoro modified nucleoside
  modified_base 16: mod_base = OTHER; note = 2'-O-methyl modified nucleoside
  modified_base 17: mod_base = OTHER; note = 2'-fluoro modified nucleoside
  modified_base 18: mod_base = OTHER; note = 2'-O-methyl modified nucleoside
  modified_base 19: mod_base = OTHER; note = 2'-fluoro modified nucleoside with phosphorothioate linkage
  modified_base 20: mod_base = OTHER; note = 2'-O-methyl modified nucleoside with phosphorothioate linkage
  modified_base 21: mod_base = OTHER; note = 2'-O-methyl modified nucleoside
ttctcattggagaggataatt

SEQ ID NO: 2317 - RNA, 21 nt, synthetic construct
  source 1..21: mol_type = other RNA
  modified_base 1: mod_base = OTHER; note = 2'-fluoro modified nucleoside with phosphorothioate linkage
  modified_base 2: mod_base = OTHER; note = 2'-O-methyl modified nucleoside with phosphorothioate linkage
  modified_base 3: mod_base = OTHER; note = 2'-fluoro modified nucleoside
  modified_base 4: mod_base = OTHER; note = 2'-O-methyl modified nucleoside
  modified_base 5: mod_base = OTHER; note = 2'-fluoro modified nucleoside
  modified_base 6: mod_base = OTHER; note = 2'-O-methyl modified nucleoside
  modified_base 7: mod_base = OTHER; note = 2'-fluoro modified nucleoside
  modified_base 8: mod_base = OTHER; note = 2'-O-methyl modified nucleoside
  modified_base 9: mod_base = OTHER; note = 2'-fluoro modified nucleoside
  modified_base 10: mod_base = OTHER; note = 2'-O-methyl modified nucleoside
  modified_base 11: mod_base = OTHER; note = 2'-fluoro modified nucleoside
  modified_base 12: mod_base = OTHER; note = 2'-O-methyl modified nucleoside
  modified_base 13: mod_base = OTHER; note = 2'-fluoro modified nucleoside
  modified_base 14: mod_base = OTHER; note = 2'-O-methyl modified nucleoside
  modified_base 15: mod_base = OTHER; note = 2'-fluoro modified nucleoside
  modified_base 16: mod_base = OTHER; note = 2'-O-methyl modified nucleoside
  modified_base 17: mod_base = OTHER; note = 2'-fluoro modified nucleoside
  modified_base 18: mod_base = OTHER; note = 2'-O-methyl modified nucleoside
  modified_base 19: mod_base = OTHER; note = 2'-fluoro modified nucleoside with phosphorothioate linkage
  modified_base 20: mod_base = OTHER; note = 2'-O-methyl modified nucleoside with phosphorothioate linkage
  modified_base 21: mod_base = OTHER; note = 2'-O-methyl modified nucleoside
ctcattggagaggataaaatt

SEQ ID NO: 2318 - RNA, 21 nt, synthetic construct
  source 1..21: mol_type = other RNA
  modified_base 1: mod_base = OTHER; note = 2'-fluoro modified nucleoside with phosphorothioate linkage
  modified_base 2: mod_base = OTHER; note = 2'-O-methyl modified nucleoside with phosphorothioate linkage
  modified_base 3: mod_base = OTHER; note = 2'-fluoro modified nucleoside
  modified_base 4: mod_base = OTHER; note = 2'-O-methyl modified nucleoside
  modified_base 5: mod_base = OTHER; note = 2'-fluoro modified nucleoside
  modified_base 6: mod_base = OTHER; note = 2'-O-methyl modified nucleoside
  modified_base 7: mod_base = OTHER; note = 2'-fluoro modified nucleoside
  modified_base 8: mod_base = OTHER; note = 2'-O-methyl modified nucleoside
  modified_base 9: mod_base = OTHER; note = 2'-fluoro modified nucleoside
  modified_base 10: mod_base = OTHER; note = 2'-O-methyl modified nucleoside
  modified_base 11: mod_base = OTHER; note = 2'-fluoro modified nucleoside
  modified_base 12: mod_base = OTHER; note = 2'-O-methyl modified nucleoside
  modified_base 13: mod_base = OTHER; note = 2'-fluoro modified nucleoside
  modified_base 14: mod_base = OTHER; note = 2'-O-methyl modified nucleoside
  modified_base 15: mod_base = OTHER; note = 2'-fluoro modified nucleoside
  modified_base 16: mod_base = OTHER; note = 2'-O-methyl modified nucleoside
  modified_base 17: mod_base = OTHER; note = 2'-fluoro modified nucleoside
  modified_base 18: mod_base = OTHER; note = 2'-O-methyl modified nucleoside
  modified_base 19: mod_base = OTHER; note = 2'-fluoro modified nucleoside with phosphorothioate linkage
  modified_base 20: mod_base = OTHER; note = 2'-O-methyl modified nucleoside with phosphorothioate linkage
  modified_base 21: mod_base = OTHER; note = 2'-O-methyl modified nucleoside
agacagttatgcggattcatt

SEQ ID NO: 2319 - RNA, 21 nt, synthetic construct
  source 1..21: mol_type = other RNA
  modified_base 1: mod_base = OTHER; note = 2'-fluoro modified nucleoside with phosphorothioate linkage
  modified_base 2: mod_base = OTHER; note = 2'-O-methyl modified nucleoside with phosphorothioate linkage
  modified_base 3: mod_base = OTHER; note = 2'-fluoro modified nucleoside
  modified_base 4: mod_base = OTHER; note = 2'-O-methyl modified nucleoside
  modified_base 5: mod_base = OTHER; note = 2'-fluoro modified nucleoside
  modified_base 6: mod_base = OTHER; note = 2'-O-methyl modified nucleoside
  modified_base 7: mod_base = OTHER; note = 2'-fluoro modified nucleoside
  modified_base 8: mod_base = OTHER; note = 2'-O-methyl modified nucleoside
  modified_base 9: mod_base = OTHER; note = 2'-fluoro modified nucleoside
  modified_base 10: mod_base = OTHER; note = 2'-O-methyl modified nucleoside
  modified_base 11: mod_base = OTHER; note = 2'-fluoro modified nucleoside
  modified_base 12: mod_base = OTHER; note = 2'-O-methyl modified nucleoside
  modified_base 13: mod_base = OTHER; note = 2'-fluoro modified nucleoside
  modified_base 14: mod_base = OTHER; note = 2'-O-methyl modified nucleoside
  modified_base 15: mod_base = OTHER; note = 2'-fluoro modified nucleoside
  modified_base 16: mod_base = OTHER; note = 2'-O-methyl modified nucleoside
  modified_base 17: mod_base = OTHER; note = 2'-fluoro modified nucleoside
  modified_base 18: mod_base = OTHER; note = 2'-O-methyl modified nucleoside
  modified_base 19: mod_base = OTHER; note = 2'-fluoro modified nucleoside with phosphorothioate linkage
  modified_base 20: mod_base = OTHER; note = 2'-O-methyl modified nucleoside with phosphorothioate linkage
  modified_base 21: mod_base = OTHER; note = 2'-O-methyl modified nucleoside
gacagttatgcggattctatt

SEQ ID NO: 2320 - RNA, 21 nt, synthetic construct
  source 1..21: mol_type = other RNA
  modified_base 1: mod_base = OTHER; note = 2'-fluoro modified nucleoside with phosphorothioate linkage
  modified_base 2: mod_base = OTHER; note = 2'-O-methyl modified nucleoside with phosphorothioate linkage
  modified_base 3: mod_base = OTHER; note = 2'-fluoro modified nucleoside
  modified_base 4: mod_base = OTHER; note = 2'-O-methyl modified nucleoside
  modified_base 5: mod_base = OTHER; note = 2'-fluoro modified nucleoside
  modified_base 6: mod_base = OTHER; note = 2'-O-methyl modified nucleoside
  modified_base 7: mod_base = OTHER; note = 2'-fluoro modified nucleoside
  modified_base 8: mod_base = OTHER; note = 2'-O-methyl modified nucleoside
  modified_base 9: mod_base = OTHER; note = 2'-fluoro modified nucleoside
  modified_base 10: mod_base = OTHER; note = 2'-O-methyl modified nucleoside
  modified_base 11: mod_base = OTHER; note = 2'-fluoro modified nucleoside
  modified_base 12: mod_base = OTHER; note = 2'-O-methyl modified nucleoside
  modified_base 13: mod_base = OTHER; note = 2'-fluoro modified nucleoside
  modified_base 14: mod_base = OTHER; note = 2'-O-methyl modified nucleoside
  modified_base 15: mod_base = OTHER; note = 2'-fluoro modified nucleoside
  modified_base 16: mod_base = OTHER; note = 2'-O-methyl modified nucleoside
  modified_base 17: mod_base = OTHER; note = 2'-fluoro modified nucleoside
  modified_base 18: mod_base = OTHER; note = 2'-O-methyl modified nucleoside
  modified_base 19: mod_base = OTHER; note = 2'-fluoro modified nucleoside with phosphorothioate linkage
  modified_base 20: mod_base = OTHER; note = 2'-O-methyl modified nucleoside with phosphorothioate linkage
  modified_base 21: mod_base = OTHER; note = 2'-O-methyl modified nucleoside
ttatgcggattctcttgaatt

SEQ ID NO: 2321 - RNA, 21 nt, synthetic construct
  source 1..21: mol_type = other RNA
  modified_base 1: mod_base = OTHER; note = 2'-fluoro modified nucleoside with phosphorothioate linkage
  modified_base 2: mod_base = OTHER; note = 2'-O-methyl modified nucleoside with phosphorothioate linkage
  modified_base 3: mod_base = OTHER; note = 2'-fluoro modified nucleoside
  modified_base 4: mod_base = OTHER; note = 2'-O-methyl modified nucleoside
  modified_base 5: mod_base = OTHER; note = 2'-fluoro modified nucleoside
  modified_base 6: mod_base = OTHER; note = 2'-O-methyl modified nucleoside
  modified_base 7: mod_base = OTHER; note = 2'-fluoro modified nucleoside
  modified_base 8: mod_base = OTHER; note = 2'-O-methyl modified nucleoside
  modified_base 9: mod_base = OTHER; note = 2'-fluoro modified nucleoside
  modified_base 10: mod_base = OTHER; note = 2'-O-methyl modified nucleoside
  modified_base 11: mod_base = OTHER; note = 2'-fluoro modified nucleoside
  modified_base 12: mod_base = OTHER; note = 2'-O-methyl modified nucleoside
  modified_base 13: mod_base = OTHER; note = 2'-fluoro modified nucleoside
  modified_base 14: mod_base = OTHER; note = 2'-O-methyl modified nucleoside
  modified_base 15: mod_base = OTHER; note = 2'-fluoro modified nucleoside
  modified_base 16: mod_base = OTHER; note = 2'-O-methyl modified nucleoside
  modified_base 17: mod_base = OTHER; note = 2'-fluoro modified nucleoside
  modified_base 18: mod_base = OTHER; note = 2'-O-methyl modified nucleoside
  modified_base 19: mod_base = OTHER; note = 2'-fluoro modified nucleoside with phosphorothioate linkage
  modified_base 20: mod_base = OTHER; note = 2'-O-methyl modified nucleoside with phosphorothioate linkage
  modified_base 21: mod_base = OTHER; note = 2'-O-methyl modified nucleoside
tatgcggattctcttgaaatt

SEQ ID NO: 2322 - RNA, 21 nt, synthetic construct
  source 1..21: mol_type = other RNA
  modified_base 1: mod_base = OTHER; note = 2'-fluoro modified nucleoside with phosphorothioate linkage
  modified_base 2: mod_base = OTHER; note = 2'-O-methyl modified nucleoside with phosphorothioate linkage
  modified_base 3: mod_base = OTHER; note = 2'-fluoro modified nucleoside
  modified_base 4: mod_base = OTHER; note = 2'-O-methyl modified nucleoside
  modified_base 5: mod_base = OTHER; note = 2'-fluoro modified nucleoside
  modified_base 6: mod_base = OTHER; note = 2'-O-methyl modified nucleoside
  modified_base 7: mod_base = OTHER; note = 2'-fluoro modified nucleoside
  modified_base 8: mod_base = OTHER; note = 2'-O-methyl modified nucleoside
  modified_base 9: mod_base = OTHER; note = 2'-fluoro modified nucleoside
  modified_base 10: mod_base = OTHER; note = 2'-O-methyl modified nucleoside
  modified_base 11: mod_base = OTHER; note = 2'-fluoro modified nucleoside
  modified_base 12: mod_base = OTHER; note = 2'-O-methyl modified nucleoside
  modified_base 13: mod_base = OTHER; note = 2'-fluoro modified nucleoside
  modified_base 14: mod_base = OTHER; note = 2'-O-methyl modified nucleoside
  modified_base 15: mod_base = OTHER; note = 2'-fluoro modified nucleoside
  modified_base 16: mod_base = OTHER; note = 2'-O-methyl modified nucleoside
  modified_base 17: mod_base = OTHER; note = 2'-fluoro modified nucleoside
  modified_base 18: mod_base = OTHER; note = 2'-O-methyl modified nucleoside
  modified_base 19: mod_base = OTHER; note = 2'-fluoro modified nucleoside with phosphorothioate linkage
  modified_base 20: mod_base = OTHER; note = 2'-O-methyl modified nucleoside with phosphorothioate linkage
  modified_base 21: mod_base = OTHER; note = 2'-O-methyl modified nucleoside
atgcggattctcttgaaaatt

SEQ ID NO: 2323 - RNA, 21 nt, synthetic construct
  source 1..21: mol_type = other RNA
  modified_base 1: mod_base = OTHER; note = 2'-fluoro modified nucleoside with phosphorothioate linkage
  modified_base 2: mod_base = OTHER; note = 2'-O-methyl modified nucleoside with phosphorothioate linkage
  modified_base 3: mod_base = OTHER; note = 2'-fluoro modified nucleoside
  modified_base 4: mod_base = OTHER; note = 2'-O-methyl modified nucleoside
  modified_base 5: mod_base = OTHER; note = 2'-fluoro modified nucleoside
  modified_base 6: mod_base = OTHER; note = 2'-O-methyl modified nucleoside
  modified_base 7: mod_base = OTHER; note = 2'-fluoro modified nucleoside
  modified_base 8: mod_base = OTHER; note = 2'-O-methyl modified nucleoside
  modified_base 9: mod_base = OTHER; note = 2'-fluoro modified nucleoside
  modified_base 10: mod_base = OTHER; note = 2'-O-methyl modified nucleoside
  modified_base 11: mod_base = OTHER; note = 2'-fluoro modified nucleoside
  modified_base 12: mod_base = OTHER; note = 2'-O-methyl modified nucleoside
  modified_base 13: mod_base = OTHER; note = 2'-fluoro modified nucleoside
  modified_base 14: mod_base = OTHER; note = 2'-O-methyl modified nucleoside
  modified_base 15: mod_base = OTHER; note = 2'-fluoro modified nucleoside
  modified_base 16: mod_base = OTHER; note = 2'-O-methyl modified nucleoside
  modified_base 17: mod_base = OTHER; note = 2'-fluoro modified nucleoside
  modified_base 18: mod_base = OTHER; note = 2'-O-methyl modified nucleoside
  modified_base 19: mod_base = OTHER; note = 2'-fluoro modified nucleoside with phosphorothioate linkage
  modified_base 20: mod_base = OTHER; note = 2'-O-methyl modified nucleoside with phosphorothioate linkage
  modified_base 21: mod_base = OTHER; note = 2'-O-methyl modified nucleoside
tacagagtggtgttacggatt

SEQ ID NO: 2324 - RNA, 21 nt, synthetic construct
  source 1..21: mol_type = other RNA
  modified_base 1: mod_base = OTHER; note = 2'-fluoro modified nucleoside with phosphorothioate linkage
  modified_base 2: mod_base = OTHER; note = 2'-O-methyl modified nucleoside with phosphorothioate linkage
  modified_base 3: mod_base = OTHER; note = 2'-fluoro modified nucleoside
  modified_base 4: mod_base = OTHER; note = 2'-O-methyl modified nucleoside
  modified_base 5: mod_base = OTHER; note = 2'-fluoro modified nucleoside
  modified_base 6: mod_base = OTHER; note = 2'-O-methyl modified nucleoside
  modified_base 7: mod_base = OTHER; note = 2'-fluoro modified nucleoside
  modified_base 8: mod_base = OTHER; note = 2'-O-methyl modified nucleoside
  modified_base 9: mod_base = OTHER; note = 2'-fluoro modified nucleoside
  modified_base 10: mod_base = OTHER; note = 2'-O-methyl modified nucleoside
  modified_base 11: mod_base = OTHER; note = 2'-fluoro modified nucleoside
  modified_base 12: mod_base = OTHER; note = 2'-O-methyl modified nucleoside
  modified_base 13: mod_base = OTHER; note = 2'-fluoro modified nucleoside
  modified_base 14: mod_base = OTHER; note = 2'-O-methyl modified nucleoside
  modified_base 15: mod_base = OTHER; note = 2'-fluoro modified nucleoside
  modified_base 16: mod_base = OTHER; note = 2'-O-methyl modified nucleoside
  modified_base 17: mod_base = OTHER; note = 2'-fluoro modified nucleoside
  modified_base 18: mod_base = OTHER; note = 2'-O-methyl modified nucleoside
  modified_base 19: mod_base = OTHER; note = 2'-fluoro modified nucleoside with phosphorothioate linkage
  modified_base 20: mod_base = OTHER; note = 2'-O-methyl modified nucleoside with phosphorothioate linkage
  modified_base 21: mod_base = OTHER; note = 2'-O-methyl modified nucleoside
gtgttacggcggtggaaaatt

SEQ ID NO: 2325 - RNA, 21 nt, synthetic construct
  source 1..21: mol_type = other RNA
  modified_base 1: mod_base = OTHER; note = 2'-fluoro modified nucleoside with phosphorothioate linkage
  modified_base 2: mod_base = OTHER; note = 2'-O-methyl modified nucleoside with phosphorothioate linkage
  modified_base 3: mod_base = OTHER; note = 2'-fluoro modified nucleoside
  modified_base 4: mod_base = OTHER; note = 2'-O-methyl modified nucleoside
  modified_base 5: mod_base = OTHER; note = 2'-fluoro modified nucleoside
  modified_base 6: mod_base = OTHER; note = 2'-O-methyl modified nucleoside
  modified_base 7: mod_base = OTHER; note = 2'-fluoro modified nucleoside
  modified_base 8: mod_base = OTHER; note = 2'-O-methyl modified nucleoside
  modified_base 9: mod_base = OTHER; note = 2'-fluoro modified nucleoside
  modified_base 10: mod_base = OTHER; note = 2'-O-methyl modified nucleoside
  modified_base 11: mod_base = OTHER; note = 2'-fluoro modified nucleoside
  modified_base 12: mod_base = OTHER; note = 2'-O-methyl modified nucleoside
  modified_base 13: mod_base = OTHER; note = 2'-fluoro modified nucleoside
  modified_base 14: mod_base = OTHER; note = 2'-O-methyl modified nucleoside
  modified_base 15: mod_base = OTHER; note = 2'-fluoro modified nucleoside
  modified_base 16: mod_base = OTHER; note = 2'-O-methyl modified nucleoside
  modified_base 17: mod_base = OTHER; note = 2'-fluoro modified nucleoside
  modified_base 18: mod_base = OTHER; note = 2'-O-methyl modified nucleoside
  modified_base 19: mod_base = OTHER; note = 2'-fluoro modified nucleoside with phosphorothioate linkage
  modified_base 20: mod_base = OTHER; note = 2'-O-methyl modified nucleoside with phosphorothioate linkage
  modified_base 21: mod_base = OTHER; note = 2'-O-methyl modified nucleoside
tgttacggcggtggaaaaatt

SEQ ID NO: 2326 - RNA, 21 nt, synthetic construct
  source 1..21: mol_type = other RNA
  modified_base 1: mod_base = OTHER; note = 2'-fluoro modified nucleoside with phosphorothioate linkage
  modified_base 2: mod_base = OTHER; note = 2'-O-methyl modified nucleoside with phosphorothioate linkage
  modified_base 3: mod_base = OTHER; note = 2'-fluoro modified nucleoside
  modified_base 4: mod_base = OTHER; note = 2'-O-methyl modified nucleoside
  modified_base 5: mod_base = OTHER; note = 2'-fluoro modified nucleoside
  modified_base 6: mod_base = OTHER; note = 2'-O-methyl modified nucleoside
  modified_base 7: mod_base = OTHER; note = 2'-fluoro modified nucleoside
  modified_base 8: mod_base = OTHER; note = 2'-O-methyl modified nucleoside
  modified_base 9: mod_base = OTHER; note = 2'-fluoro modified nucleoside
  modified_base 10: mod_base = OTHER; note = 2'-O-methyl modified nucleoside
  modified_base 11: mod_base = OTHER; note = 2'-fluoro modified nucleoside
  modified_base 12: mod_base = OTHER; note = 2'-O-methyl modified nucleoside
  modified_base 13: mod_base = OTHER; note = 2'-fluoro modified nucleoside
  modified_base 14: mod_base = OTHER; note = 2'-O-methyl modified nucleoside
  modified_base 15: mod_base = OTHER; note = 2'-fluoro modified nucleoside
  modified_base 16: mod_base = OTHER; note = 2'-O-methyl modified nucleoside
  modified_base 17: mod_base = OTHER; note = 2'-fluoro modified nucleoside
  modified_base 18: mod_base = OTHER; note = 2'-O-methyl modified nucleoside
  modified_base 19: mod_base = OTHER; note = 2'-fluoro modified nucleoside with phosphorothioate linkage
  modified_base 20: mod_base = OTHER; note = 2'-O-methyl modified nucleoside with phosphorothioate linkage
  modified_base 21: mod_base = OTHER; note = 2'-O-methyl modified nucleoside
gttacggcggtggaaaagatt

SEQ ID NO: 2327 - RNA, 21 nt, synthetic construct
  source 1..21: mol_type = other RNA
  modified_base 1: mod_base = OTHER; note = 2'-fluoro modified nucleoside with phosphorothioate linkage
  modified_base 2: mod_base = OTHER; note = 2'-O-methyl modified nucleoside with phosphorothioate linkage
  modified_base 3: mod_base = OTHER; note = 2'-fluoro modified nucleoside
  modified_base 4: mod_base = OTHER; note = 2'-O-methyl modified nucleoside
  modified_base 5: mod_base = OTHER; note = 2'-fluoro modified nucleoside
  modified_base 6: mod_base = OTHER; note = 2'-O-methyl modified nucleoside
  modified_base 7: mod_base = OTHER; note = 2'-fluoro modified nucleoside
  modified_base 8: mod_base = OTHER; note = 2'-O-methyl modified nucleoside
  modified_base 9: mod_base = OTHER; note = 2'-fluoro modified nucleoside
  modified_base 10: mod_base = OTHER; note = 2'-O-methyl modified nucleoside
  modified_base 11: mod_base = OTHER; note = 2'-fluoro modified nucleoside
  modified_base 12: mod_base = OTHER; note = 2'-O-methyl modified nucleoside
  modified_base 13: mod_base = OTHER; note = 2'-fluoro modified nucleoside
  modified_base 14: mod_base = OTHER; note = 2'-O-methyl modified nucleoside
  modified_base 15: mod_base = OTHER; note = 2'-fluoro modified nucleoside
  modified_base 16: mod_base = OTHER; note = 2'-O-methyl modified nucleoside
  modified_base 17: mod_base = OTHER; note = 2'-fluoro modified nucleoside
  modified_base 18: mod_base = OTHER; note = 2'-O-methyl modified nucleoside
  modified_base 19: mod_base = OTHER; note = 2'-fluoro modified nucleoside with phosphorothioate linkage
  modified_base 20: mod_base = OTHER; note = 2'-O-methyl modified nucleoside with phosphorothioate linkage
  modified_base 21: mod_base = OTHER; note = 2'-O-methyl modified nucleoside
ttacggcggtggaaaagtatt

SEQ ID NO: 2328 - RNA, 21 nt, synthetic construct
  source 1..21: mol_type = other RNA
  modified_base 1: mod_base = OTHER; note = 2'-fluoro modified nucleoside with phosphorothioate linkage
  modified_base 2: mod_base = OTHER; note = 2'-O-methyl modified nucleoside with phosphorothioate linkage
  modified_base 3: mod_base = OTHER; note = 2'-fluoro modified nucleoside
  modified_base 4: mod_base = OTHER; note = 2'-O-methyl modified nucleoside
  modified_base 5: mod_base = OTHER; note = 2'-fluoro modified nucleoside
  modified_base 6: mod_base = OTHER; note = 2'-O-methyl modified nucleoside
  modified_base 7: mod_base = OTHER; note = 2'-fluoro modified nucleoside
  modified_base 8: mod_base = OTHER; note = 2'-O-methyl modified nucleoside
  modified_base 9: mod_base = OTHER; note = 2'-fluoro modified nucleoside
  modified_base 10: mod_base = OTHER; note = 2'-O-methyl modified nucleoside
  modified_base 11: mod_base = OTHER; note = 2'-fluoro modified nucleoside
  modified_base 12: mod_base = OTHER; note = 2'-O-methyl modified nucleoside
  modified_base 13: mod_base = OTHER; note = 2'-fluoro modified nucleoside
  modified_base 14: mod_base = OTHER; note = 2'-O-methyl modified nucleoside
  modified_base 15: mod_base = OTHER; note = 2'-fluoro modified nucleoside
  modified_base 16: mod_base = OTHER; note = 2'-O-methyl modified nucleoside
  modified_base 17: mod_base = OTHER; note = 2'-fluoro modified nucleoside
  modified_base 18: mod_base = OTHER; note = 2'-O-methyl modified nucleoside
  modified_base 19: mod_base = OTHER; note = 2'-fluoro modified nucleoside with phosphorothioate linkage
  modified_base 20: mod_base = OTHER; note = 2'-O-methyl modified nucleoside with phosphorothioate linkage
  modified_base 21: mod_base = OTHER; note = 2'-O-methyl modified nucleoside
tacggcggtggaaaagttatt

SEQ ID NO: 2329 - RNA, 21 nt, synthetic construct
  source 1..21: mol_type = other RNA
  modified_base 1: mod_base = OTHER; note = 2'-fluoro modified nucleoside with phosphorothioate linkage
  modified_base 2: mod_base = OTHER; note = 2'-O-methyl modified nucleoside with phosphorothioate linkage
  modified_base 3: mod_base = OTHER; note = 2'-fluoro modified nucleoside
  modified_base 4: mod_base = OTHER; note = 2'-O-methyl modified nucleoside
  modified_base 5: mod_base = OTHER; note = 2'-fluoro modified nucleoside
  modified_base 6: mod_base = OTHER; note = 2'-O-methyl modified nucleoside
  modified_base 7: mod_base = OTHER; note = 2'-fluoro modified nucleoside
  modified_base 8: mod_base = OTHER; note = 2'-O-methyl modified nucleoside
  modified_base 9: mod_base = OTHER; note = 2'-fluoro modified nucleoside
  modified_base 10: mod_base = OTHER; note = 2'-O-methyl modified nucleoside
  modified_base 11: mod_base = OTHER; note = 2'-fluoro modified nucleoside
  modified_base 12: mod_base = OTHER; note = 2'-O-methyl modified nucleoside
  modified_base 13: mod_base = OTHER; note = 2'-fluoro modified nucleoside
  modified_base 14: mod_base = OTHER; note = 2'-O-methyl modified nucleoside
  modified_base 15: mod_base = OTHER; note = 2'-fluoro modified nucleoside
  modified_base 16: mod_base = OTHER; note = 2'-O-methyl modified nucleoside
  modified_base 17: mod_base = OTHER; note = 2'-fluoro modified nucleoside
  modified_base 18: mod_base = OTHER; note = 2'-O-methyl modified nucleoside
  modified_base 19: mod_base = OTHER; note = 2'-fluoro modified nucleoside with phosphorothioate linkage
  modified_base 20: mod_base = OTHER; note = 2'-O-methyl modified nucleoside with phosphorothioate linkage
  modified_base 21: mod_base = OTHER; note = 2'-O-methyl modified nucleoside
cggcggtggaaaagtttaatt

SEQ ID NO: 2330 - RNA, 21 nt, synthetic construct
  source 1..21: mol_type = other RNA
  modified_base 1: mod_base = OTHER; note = 2'-fluoro modified nucleoside with phosphorothioate linkage
  modified_base 2: mod_base = OTHER; note = 2'-O-methyl modified nucleoside with phosphorothioate linkage
  modified_base 3: mod_base = OTHER; note = 2'-fluoro modified nucleoside
  modified_base 4: mod_base = OTHER; note = 2'-O-methyl modified nucleoside
  modified_base 5: mod_base = OTHER; note = 2'-fluoro modified nucleoside
  modified_base 6: mod_base = OTHER; note = 2'-O-methyl modified nucleoside
  modified_base 7: mod_base = OTHER; note = 2'-fluoro modified nucleoside
  modified_base 8: mod_base = OTHER; note = 2'-O-methyl modified nucleoside
  modified_base 9: mod_base = OTHER; note = 2'-fluoro modified nucleoside
  modified_base 10: mod_base = OTHER; note = 2'-O-methyl modified nucleoside
  modified_base 11: mod_base = OTHER; note = 2'-fluoro modified nucleoside
  modified_base 12: mod_base = OTHER; note = 2'-O-methyl modified nucleoside
  modified_base 13: mod_base = OTHER; note = 2'-fluoro modified nucleoside
  modified_base 14: mod_base = OTHER; note = 2'-O-methyl modified nucleoside
  modified_base 15: mod_base = OTHER; note = 2'-fluoro modified nucleoside
  modified_base 16: mod_base = OTHER; note = 2'-O-methyl modified nucleoside
  modified_base 17: mod_base = OTHER; note = 2'-fluoro modified nucleoside
  modified_base 18: mod_base = OTHER; note = 2'-O-methyl modified nucleoside
  modified_base 19: mod_base = OTHER; note = 2'-fluoro modified nucleoside with phosphorothioate linkage
  modified_base 20: mod_base = OTHER; note = 2'-O-methyl modified nucleoside with phosphorothioate linkage
  modified_base 21: mod_base = OTHER; note = 2'-O-methyl modified nucleoside
agtttaaagttgcctaagatt

SEQ ID NO: 2331 - RNA, 21 nt, synthetic construct
  source 1..21: mol_type = other RNA
  modified_base 1: mod_base = OTHER; note = 2'-fluoro modified nucleoside with phosphorothioate linkage
  modified_base 2: mod_base = OTHER; note = 2'-O-methyl modified nucleoside with phosphorothioate linkage
  modified_base 3: mod_base = OTHER; note = 2'-fluoro modified nucleoside
  modified_base 4: mod_base = OTHER; note = 2'-O-methyl modified nucleoside
  modified_base 5: mod_base = OTHER; note = 2'-fluoro modified nucleoside
  modified_base 6: mod_base = OTHER; note = 2'-O-methyl modified nucleoside
  modified_base 7: mod_base = OTHER; note = 2'-fluoro modified nucleoside
  modified_base 8: mod_base = OTHER; note = 2'-O-methyl modified nucleoside
  modified_base 9: mod_base = OTHER; note = 2'-fluoro modified nucleoside
  modified_base 10: mod_base = OTHER; note = 2'-O-methyl modified nucleoside
  modified_base 11: mod_base = OTHER; note = 2'-fluoro modified nucleoside
  modified_base 12: mod_base = OTHER; note = 2'-O-methyl modified nucleoside
  modified_base 13: mod_base = OTHER; note = 2'-fluoro modified nucleoside
  modified_base 14: mod_base = OTHER; note = 2'-O-methyl modified nucleoside
  modified_base 15: mod_base = OTHER; note = 2'-fluoro modified nucleoside
  modified_base 16: mod_base = OTHER; note = 2'-O-methyl modified nucleoside
  modified_base 17: mod_base = OTHER; note = 2'-fluoro modified nucleoside
  modified_base 18: mod_base = OTHER; note = 2'-O-methyl modified nucleoside
  modified_base 19: mod_base = OTHER; note = 2'-fluoro modified nucleoside with phosphorothioate linkage
  modified_base 20: mod_base = OTHER; note = 2'-O-methyl modified nucleoside with phosphorothioate linkage
  modified_base 21: mod_base = OTHER; note = 2'-O-methyl modified nucleoside
tttaaagttgcctaagaaatt

SEQ ID NO: 2332 - RNA, 21 nt, synthetic construct
  source 1..21: mol_type = other RNA
  modified_base 1: mod_base = OTHER; note = 2'-fluoro modified nucleoside with phosphorothioate linkage
  modified_base 2: mod_base = OTHER; note = 2'-O-methyl modified nucleoside with phosphorothioate linkage
  modified_base 3: mod_base = OTHER; note = 2'-fluoro modified nucleoside
  modified_base 4: mod_base = OTHER; note = 2'-O-methyl modified nucleoside
  modified_base 5: mod_base = OTHER; note = 2'-fluoro modified nucleoside
  modified_base 6: mod_base = OTHER; note = 2'-O-methyl modified nucleoside
  modified_base 7: mod_base = OTHER; note = 2'-fluoro modified nucleoside
  modified_base 8: mod_base = OTHER; note = 2'-O-methyl modified nucleoside
  modified_base 9: mod_base = OTHER; note = 2'-fluoro modified nucleoside
  modified_base 10: mod_base = OTHER; note = 2'-O-methyl modified nucleoside
  modified_base 11: mod_base = OTHER; note = 2'-fluoro modified nucleoside
  modified_base 12: mod_base = OTHER; note = 2'-O-methyl modified nucleoside
  modified_base 13: mod_base = OTHER; note = 2'-fluoro modified nucleoside
  modified_base 14: mod_base = OTHER; note = 2'-O-methyl modified nucleoside
  modified_base 15: mod_base = OTHER; note = 2'-fluoro modified nucleoside
  modified_base 16: mod_base = OTHER; note = 2'-O-methyl modified nucleoside
  modified_base 17: mod_base = OTHER; note = 2'-fluoro modified nucleoside
  modified_base 18: mod_base = OTHER; note = 2'-O-methyl modified nucleoside
  modified_base 19: mod_base = OTHER; note = 2'-fluoro modified nucleoside with phosphorothioate linkage
  modified_base 20: mod_base = OTHER; note = 2'-O-methyl modified nucleoside with phosphorothioate linkage
  modified_base 21: mod_base = OTHER; note = 2'-O-methyl modified nucleoside
tggattgctttttagcaaatt

SEQ ID NO: 2333 - RNA, 21 nt, synthetic construct
  source 1..21: mol_type = other RNA
  modified_base 1: mod_base = OTHER; note = 2'-fluoro modified nucleoside with phosphorothioate linkage
  modified_base 2: mod_base = OTHER; note = 2'-O-methyl modified nucleoside with phosphorothioate linkage
  modified_base 3: mod_base = OTHER; note = 2'-fluoro modified nucleoside
  modified_base 4: mod_base = OTHER; note = 2'-O-methyl modified nucleoside
  modified_base 5: mod_base = OTHER; note = 2'-fluoro modified nucleoside
  modified_base 6: mod_base = OTHER; note = 2'-O-methyl modified nucleoside
  modified_base 7: mod_base = OTHER; note = 2'-fluoro modified nucleoside
  modified_base 8: mod_base = OTHER; note = 2'-O-methyl modified nucleoside
  modified_base 9: mod_base = OTHER; note = 2'-fluoro modified nucleoside
  modified_base 10: mod_base = OTHER; note = 2'-O-methyl modified nucleoside
  modified_base 11: mod_base = OTHER; note = 2'-fluoro modified nucleoside
  modified_base 12: mod_base = OTHER; note = 2'-O-methyl modified nucleoside
  modified_base 13: mod_base = OTHER; note = 2'-fluoro modified nucleoside
  modified_base 14: mod_base = OTHER; note = 2'-O-methyl modified nucleoside
  modified_base 15: mod_base = OTHER; note = 2'-fluoro modified nucleoside
  modified_base 16: mod_base = OTHER; note = 2'-O-methyl modified nucleoside
  modified_base 17: mod_base = OTHER; note = 2'-fluoro modified nucleoside
  modified_base 18: mod_base = OTHER; note = 2'-O-methyl modified nucleoside
  modified_base 19: mod_base = OTHER; note = 2'-fluoro modified nucleoside with phosphorothioate linkage
  modified_base 20: mod_base = OTHER; note = 2'-O-methyl modified nucleoside with phosphorothioate linkage
  modified_base 21: mod_base = OTHER; note = 2'-O-methyl modified nucleoside
gaaggggtcacctgaaaaatt

SEQ ID NO: 2334 - RNA, 21 nt, synthetic construct
  source 1..21: mol_type = other RNA
  modified_base 1: mod_base = OTHER; note = 2'-fluoro modified nucleoside with phosphorothioate linkage
  modified_base 2: mod_base = OTHER; note = 2'-O-methyl modified nucleoside with phosphorothioate linkage
  modified_base 3: mod_base = OTHER; note = 2'-fluoro modified nucleoside
  modified_base 4: mod_base = OTHER; note = 2'-O-methyl modified nucleoside
  modified_base 5: mod_base = OTHER; note = 2'-fluoro modified nucleoside
  modified_base 6: mod_base = OTHER; note = 2'-O-methyl modified nucleoside
  modified_base 7: mod_base = OTHER; note = 2'-fluoro modified nucleoside
  modified_base 8: mod_base = OTHER; note = 2'-O-methyl modified nucleoside
  modified_base 9: mod_base = OTHER; note = 2'-fluoro modified nucleoside
  modified_base 10: mod_base = OTHER; note = 2'-O-methyl modified nucleoside
  modified_base 11: mod_base = OTHER; note = 2'-fluoro modified nucleoside
  modified_base 12: mod_base = OTHER; note = 2'-O-methyl modified nucleoside
  modified_base 13: mod_base = OTHER; note = 2'-fluoro modified nucleoside
  modified_base 14: mod_base = OTHER; note = 2'-O-methyl modified nucleoside
  modified_base 15: mod_base = OTHER; note = 2'-fluoro modified nucleoside
  modified_base 16: mod_base = OTHER; note = 2'-O-methyl modified nucleoside
  modified_base 17: mod_base = OTHER; note = 2'-fluoro modified nucleoside
  modified_base 18: mod_base = OTHER; note = 2'-O-methyl modified nucleoside
  modified_base 19: mod_base = OTHER; note = 2'-fluoro modified nucleoside with phosphorothioate linkage
  modified_base 20: mod_base = OTHER; note = 2'-O-methyl modified nucleoside with phosphorothioate linkage
  modified_base 21: mod_base = OTHER; note = 2'-O-methyl modified nucleoside
aaataaagttctcttagcatt

SEQ ID NO: 2335 - RNA, 21 nt, synthetic construct
  source 1..21: mol_type = other RNA
  modified_base 1: mod_base = OTHER; note = 2'-O-methyl modified nucleoside with phosphorothioate linkage
  modified_base 2: mod_base = OTHER; note = 2'-fluoro modified nucleoside with phosphorothioate linkage
  modified_base 3: mod_base = OTHER; note = 2'-O-methyl modified nucleoside
  modified_base 4: mod_base = OTHER; note = 2'-fluoro modified nucleoside
  modified_base 5: mod_base = OTHER; note = 2'-O-methyl modified nucleoside
  modified_base 6: mod_base = OTHER; note = 2'-fluoro modified nucleoside
  modified_base 7: mod_base = OTHER; note = 2'-O-methyl modified nucleoside
  modified_base 8: mod_base = OTHER; note = 2'-fluoro modified nucleoside
  modified_base 9: mod_base = OTHER; note = 2'-O-methyl modified nucleoside
  modified_base 10: mod_base = OTHER; note = 2'-fluoro modified nucleoside
  modified_base 11: mod_base = OTHER; note = 2'-O-methyl modified nucleoside
  modified_base 12: mod_base = OTHER; note = 2'-fluoro modified nucleoside
  modified_base 13: mod_base = OTHER; note = 2'-O-methyl modified nucleoside
  modified_base 14: mod_base = OTHER; note = 2'-fluoro modified nucleoside
  modified_base 15: mod_base = OTHER; note = 2'-O-methyl modified nucleoside
  modified_base 16: mod_base = OTHER; note = 2'-fluoro modified nucleoside
  modified_base 17: mod_base = OTHER; note = 2'-O-methyl modified nucleoside
  modified_base 18: mod_base = OTHER; note = 2'-fluoro modified nucleoside
  modified_base 19: mod_base = OTHER; note = 2'-O-methyl modified nucleoside with phosphorothioate linkage
  modified_base 20: mod_base = OTHER; note = 2'-O-methyl modified nucleoside with phosphorothioate linkage
  modified_base 21: mod_base = OTHER; note = 2'-O-methyl modified nucleoside
ttaacactagccatagccatt

SEQ ID NO: 2336 - RNA, 21 nt, synthetic construct
  source 1..21: mol_type = other RNA
  modified_base 1: mod_base = OTHER; note = 2'-O-methyl modified nucleoside with phosphorothioate linkage
  modified_base 2: mod_base = OTHER; note = 2'-fluoro modified nucleoside with phosphorothioate linkage
  modified_base 3: mod_base = OTHER; note = 2'-O-methyl modified nucleoside
  modified_base 4: mod_base = OTHER; note = 2'-fluoro modified nucleoside
  modified_base 5: mod_base = OTHER; note = 2'-O-methyl modified nucleoside
  modified_base 6: mod_base = OTHER; note = 2'-fluoro modified nucleoside
  modified_base 7: mod_base = OTHER; note = 2'-O-methyl modified nucleoside
  modified_base 8: mod_base = OTHER; note = 2'-fluoro modified nucleoside
  modified_base 9: mod_base = OTHER; note = 2'-O-methyl modified nucleoside
  modified_base 10: mod_base = OTHER; note = 2'-fluoro modified nucleoside
  modified_base 11: mod_base = OTHER; note = 2'-O-methyl modified nucleoside
  modified_base 12: mod_base = OTHER; note = 2'-fluoro modified nucleoside
  modified_base 13: mod_base = OTHER; note = 2'-O-methyl modified nucleoside
  modified_base 14: mod_base = OTHER; note = 2'-fluoro modified nucleoside
  modified_base 15: mod_base = OTHER; note = 2'-O-methyl modified nucleoside
  modified_base 16: mod_base = OTHER; note = 2'-fluoro modified nucleoside
  modified_base 17: mod_base = OTHER; note = 2'-O-methyl modified nucleoside
  modified_base 18: mod_base = OTHER; note = 2'-fluoro modified nucleoside
  modified_base 19: mod_base = OTHER; note = 2'-O-methyl modified nucleoside with phosphorothioate linkage
  modified_base 20: mod_base = OTHER; note = 2'-O-methyl modified nucleoside with phosphorothioate linkage
  modified_base 21: mod_base = OTHER; note = 2'-O-methyl modified nucleoside
tgtacagagtttgtatgattt

SEQ ID NO: 2337 - RNA, 21 nt, synthetic construct
  source 1..21: mol_type = other RNA
  modified_base 1: mod_base = OTHER; note = 2'-O-methyl modified nucleoside with phosphorothioate linkage
  modified_base 2: mod_base = OTHER; note = 2'-fluoro modified nucleoside with phosphorothioate linkage
  modified_base 3: mod_base = OTHER; note = 2'-O-methyl modified nucleoside
  modified_base 4: mod_base = OTHER; note = 2'-fluoro modified nucleoside
  modified_base 5: mod_base = OTHER; note = 2'-O-methyl modified nucleoside
  modified_base 6: mod_base = OTHER; note = 2'-fluoro modified nucleoside
  modified_base 7: mod_base = OTHER; note = 2'-O-methyl modified nucleoside
  modified_base 8: mod_base = OTHER; note = 2'-fluoro modified nucleoside
  modified_base 9: mod_base = OTHER; note = 2'-O-methyl modified nucleoside
  modified_base 10: mod_base = OTHER; note = 2'-fluoro modified nucleoside
  modified_base 11: mod_base = OTHER; note = 2'-O-methyl modified nucleoside
  modified_base 12: mod_base = OTHER; note = 2'-fluoro modified nucleoside
  modified_base 13: mod_base = OTHER; note = 2'-O-methyl modified nucleoside
  modified_base 14: mod_base = OTHER; note = 2'-fluoro modified nucleoside
  modified_base 15: mod_base = OTHER; note = 2'-O-methyl modified nucleoside
  modified_base 16: mod_base = OTHER; note = 2'-fluoro modified nucleoside
  modified_base 17: mod_base = OTHER; note = 2'-O-methyl modified nucleoside
  modified_base 18: mod_base = OTHER; note = 2'-fluoro modified nucleoside
  modified_base 19: mod_base = OTHER; note = 2'-O-methyl modified nucleoside with phosphorothioate linkage
  modified_base 20: mod_base = OTHER; note = 2'-O-methyl modified nucleoside with phosphorothioate linkage
  modified_base 21: mod_base = OTHER; note = 2'-O-methyl modified nucleoside
tcgattccaggaagtacagtt

SEQ ID NO: 2338 - RNA, 21 nt, synthetic construct
  source 1..21: mol_type = other RNA
  modified_base 1: mod_base = OTHER; note = 2'-O-methyl modified nucleoside with phosphorothioate linkage
  modified_base 2: mod_base = OTHER; note = 2'-fluoro modified nucleoside with phosphorothioate linkage
  modified_base 3: mod_base = OTHER; note = 2'-O-methyl modified nucleoside
  modified_base 4: mod_base = OTHER; note = 2'-fluoro modified nucleoside
  modified_base 5: mod_base = OTHER; note = 2'-O-methyl modified nucleoside
  modified_base 6: mod_base = OTHER; note = 2'-fluoro modified nucleoside
  modified_base 7: mod_base = OTHER; note = 2'-O-methyl modified nucleoside
  modified_base 8: mod_base = OTHER; note = 2'-fluoro modified nucleoside
  modified_base 9: mod_base = OTHER; note = 2'-O-methyl modified nucleoside
  modified_base 10: mod_base = OTHER; note = 2'-fluoro modified nucleoside
  modified_base 11: mod_base = OTHER; note = 2'-O-methyl modified nucleoside
  modified_base 12: mod_base = OTHER; note = 2'-fluoro modified nucleoside
  modified_base 13: mod_base = OTHER; note = 2'-O-methyl modified nucleoside
  modified_base 14: mod_base = OTHER; note = 2'-fluoro modified nucleoside
  modified_base 15: mod_base = OTHER; note = 2'-O-methyl modified nucleoside
  modified_base 16: mod_base = OTHER; note = 2'-fluoro modified nucleoside
  modified_base 17: mod_base = OTHER; note = 2'-O-methyl modified nucleoside
  modified_base 18: mod_base = OTHER; note = 2'-fluoro modified nucleoside
  modified_base 19: mod_base = OTHER; note = 2'-O-methyl modified nucleoside with phosphorothioate linkage
  modified_base 20: mod_base = OTHER; note = 2'-O-methyl modified nucleoside with phosphorothioate linkage
  modified_base 21: mod_base = OTHER; note = 2'-O-methyl modified nucleoside
ttcgattccaggaagtacatt

SEQ ID NO: 2339 - RNA, 21 nt, synthetic construct
  source 1..21: mol_type = other RNA
  modified_base 1: mod_base = OTHER; note = 2'-O-methyl modified nucleoside with phosphorothioate linkage
  modified_base 2: mod_base = OTHER; note = 2'-fluoro modified nucleoside with phosphorothioate linkage
  modified_base 3: mod_base = OTHER; note = 2'-O-methyl modified nucleoside
  modified_base 4: mod_base = OTHER; note = 2'-fluoro modified nucleoside
  modified_base 5: mod_base = OTHER; note = 2'-O-methyl modified nucleoside
  modified_base 6: mod_base = OTHER; note = 2'-fluoro modified nucleoside
  modified_base 7: mod_base = OTHER; note = 2'-O-methyl modified nucleoside
  modified_base 8: mod_base = OTHER; note = 2'-fluoro modified nucleoside
  modified_base 9: mod_base = OTHER; note = 2'-O-methyl modified nucleoside
  modified_base 10: mod_base = OTHER; note = 2'-fluoro modified nucleoside
  modified_base 11: mod_base = OTHER; note = 2'-O-methyl modified nucleoside
  modified_base 12: mod_base = OTHER; note = 2'-fluoro modified nucleoside
  modified_base 13: mod_base = OTHER; note = 2'-O-methyl modified nucleoside
  modified_base 14: mod_base = OTHER; note = 2'-fluoro modified nucleoside
  modified_base 15: mod_base = OTHER; note = 2'-O-methyl modified nucleoside
  modified_base 16: mod_base = OTHER; note = 2'-fluoro modified nucleoside
  modified_base 17: mod_base = OTHER; note = 2'-O-methyl modified nucleoside
  modified_base 18: mod_base = OTHER; note = 2'-fluoro modified nucleoside
  modified_base 19: mod_base = OTHER; note = 2'-O-methyl modified nucleoside with phosphorothioate linkage
  modified_base 20: mod_base = OTHER; note = 2'-O-methyl modified nucleoside with phosphorothioate linkage
  modified_base 21: mod_base = OTHER; note = 2'-O-methyl modified nucleoside
tatcgattccaggaagtactt

SEQ ID NO: 2340 - RNA, 21 nt, synthetic construct
  source 1..21: mol_type = other RNA
  modified_base 1: mod_base = OTHER; note = 2'-O-methyl modified nucleoside with phosphorothioate linkage
  modified_base 2: mod_base = OTHER; note = 2'-fluoro modified nucleoside with phosphorothioate linkage
  modified_base 3: mod_base = OTHER; note = 2'-O-methyl modified nucleoside
  modified_base 4: mod_base = OTHER; note = 2'-fluoro modified nucleoside
  modified_base 5: mod_base = OTHER; note = 2'-O-methyl modified nucleoside
  modified_base 6: mod_base = OTHER; note = 2'-fluoro modified nucleoside
  modified_base 7: mod_base = OTHER; note = 2'-O-methyl modified nucleoside
  modified_base 8: mod_base = OTHER; note = 2'-fluoro modified nucleoside
  modified_base 9: mod_base = OTHER; note = 2'-O-methyl modified nucleoside
  modified_base 10: mod_base = OTHER; note = 2'-fluoro modified nucleoside
  modified_base 11: mod_base = OTHER; note = 2'-O-methyl modified nucleoside
  modified_base 12: mod_base = OTHER; note = 2'-fluoro modified nucleoside
  modified_base 13: mod_base = OTHER; note = 2'-O-methyl modified nucleoside
  modified_base 14: mod_base = OTHER; note = 2'-fluoro modified nucleoside
  modified_base 15: mod_base = OTHER; note = 2'-O-methyl modified nucleoside
  modified_base 16: mod_base = OTHER; note = 2'-fluoro modified nucleoside
  modified_base 17: mod_base = OTHER; note = 2'-O-methyl modified nucleoside
  modified_base 18: mod_base = OTHER; note = 2'-fluoro modified nucleoside
  modified_base 19: mod_base = OTHER; note = 2'-O-methyl modified nucleoside with phosphorothioate linkage
  modified_base 20: mod_base = OTHER; note = 2'-O-methyl modified nucleoside with phosphorothioate linkage
  modified_base 21: mod_base = OTHER; note = 2'-O-methyl modified nucleoside
ttatcgattccaggaagtatt

SEQ ID NO: 2341 - RNA, 21 nt, synthetic construct
  source 1..21: mol_type = other RNA
  modified_base 1: mod_base = OTHER; note = 2'-O-methyl modified nucleoside with phosphorothioate linkage
  modified_base 2: mod_base = OTHER; note = 2'-fluoro modified nucleoside with phosphorothioate linkage
  modified_base 3: mod_base = OTHER; note = 2'-O-methyl modified nucleoside
  modified_base 4: mod_base = OTHER; note = 2'-fluoro modified nucleoside
  modified_base 5: mod_base = OTHER; note = 2'-O-methyl modified nucleoside
  modified_base 6: mod_base = OTHER; note = 2'-fluoro modified nucleoside
  modified_base 7: mod_base = OTHER; note = 2'-O-methyl modified nucleoside
  modified_base 8: mod_base = OTHER; note = 2'-fluoro modified nucleoside
  modified_base 9: mod_base = OTHER; note = 2'-O-methyl modified nucleoside
  modified_base 10: mod_base = OTHER; note = 2'-fluoro modified nucleoside
  modified_base 11: mod_base = OTHER; note = 2'-O-methyl modified nucleoside
  modified_base 12: mod_base = OTHER; note = 2'-fluoro modified nucleoside
  modified_base 13: mod_base = OTHER; note = 2'-O-methyl modified nucleoside
  modified_base 14: mod_base = OTHER; note = 2'-fluoro modified nucleoside
  modified_base 15: mod_base = OTHER; note = 2'-O-methyl modified nucleoside
  modified_base 16: mod_base = OTHER; note = 2'-fluoro modified nucleoside
  modified_base 17: mod_base = OTHER; note = 2'-O-methyl modified nucleoside
  modified_base 18: mod_base = OTHER; note = 2'-fluoro modified nucleoside
  modified_base 19: mod_base = OTHER; note = 2'-O-methyl modified nucleoside with phosphorothioate linkage
  modified_base 20: mod_base = OTHER; note = 2'-O-methyl modified nucleoside with phosphorothioate linkage
  modified_base 21: mod_base = OTHER; note = 2'-O-methyl modified nucleoside
tagtatcgattccaggaagtt

SEQ ID NO: 2342 - RNA, 21 nt, synthetic construct
  source 1..21: mol_type = other RNA
  modified_base 1: mod_base = OTHER; note = 2'-O-methyl modified nucleoside with phosphorothioate linkage
  modified_base 2: mod_base = OTHER; note = 2'-fluoro modified nucleoside with phosphorothioate linkage
  modified_base 3: mod_base = OTHER; note = 2'-O-methyl modified nucleoside
  modified_base 4: mod_base = OTHER; note = 2'-fluoro modified nucleoside
  modified_base 5: mod_base = OTHER; note = 2'-O-methyl modified nucleoside
  modified_base 6: mod_base = OTHER; note = 2'-fluoro modified nucleoside
  modified_base 7: mod_base = OTHER; note = 2'-O-methyl modified nucleoside
  modified_base 8: mod_base = OTHER; note = 2'-fluoro modified nucleoside
  modified_base 9: mod_base = OTHER; note = 2'-O-methyl modified nucleoside
  modified_base 10: mod_base = OTHER; note = 2'-fluoro modified nucleoside
  modified_base 11: mod_base = OTHER; note = 2'-O-methyl modified nucleoside
  modified_base 12: mod_base = OTHER; note = 2'-fluoro modified nucleoside
  modified_base 13: mod_base = OTHER; note = 2'-O-methyl modified nucleoside
  modified_base 14: mod_base = OTHER; note = 2'-fluoro modified nucleoside
  modified_base 15: mod_base = OTHER; note = 2'-O-methyl modified nucleoside
  modified_base 16: mod_base = OTHER; note = 2'-fluoro modified nucleoside
  modified_base 17: mod_base = OTHER; note = 2'-O-methyl modified nucleoside
  modified_base 18: mod_base = OTHER; note = 2'-fluoro modified nucleoside
  modified_base 19: mod_base = OTHER; note = 2'-O-methyl modified nucleoside with phosphorothioate linkage
  modified_base 20: mod_base = OTHER; note = 2'-O-methyl modified nucleoside with phosphorothioate linkage
  modified_base 21: mod_base = OTHER; note = 2'-O-methyl modified nucleoside
ttacaagtatcgattccagtt

SEQ ID NO: 2343 - RNA, 21 nt, synthetic construct
  source 1..21: mol_type = other RNA
  modified_base 1: mod_base = OTHER; note = 2'-O-methyl modified nucleoside with phosphorothioate linkage
  modified_base 2: mod_base = OTHER; note = 2'-fluoro modified nucleoside with phosphorothioate linkage
  modified_base 3: mod_base = OTHER; note = 2'-O-methyl modified nucleoside
  modified_base 4: mod_base = OTHER; note = 2'-fluoro modified nucleoside
  modified_base 5: mod_base = OTHER; note = 2'-O-methyl modified nucleoside
  modified_base 6: mod_base = OTHER; note = 2'-fluoro modified nucleoside
  modified_base 7: mod_base = OTHER; note = 2'-O-methyl modified nucleoside
  modified_base 8: mod_base = OTHER; note = 2'-fluoro modified nucleoside
  modified_base 9: mod_base = OTHER; note = 2'-O-methyl modified nucleoside
  modified_base 10: mod_base = OTHER; note = 2'-fluoro modified nucleoside
  modified_base 11: mod_base = OTHER; note = 2'-O-methyl modified nucleoside
  modified_base 12: mod_base = OTHER; note = 2'-fluoro modified nucleoside
  modified_base 13: mod_base = OTHER; note = 2'-O-methyl modified nucleoside
  modified_base 14: mod_base = OTHER; note = 2'-fluoro modified nucleoside
  modified_base 15: mod_base = OTHER; note = 2'-O-methyl modified nucleoside
  modified_base 16: mod_base = OTHER; note = 2'-fluoro modified nucleoside
  modified_base 17: mod_base = OTHER; note = 2'-O-methyl modified nucleoside
  modified_base 18: mod_base = OTHER; note = 2'-fluoro modified nucleoside
  modified_base 19: mod_base = OTHER; note = 2'-O-methyl modified nucleoside with phosphorothioate linkage
  modified_base 20: mod_base = OTHER; note = 2'-O-methyl modified nucleoside with phosphorothioate linkage
  modified_base 21: mod_base = OTHER; note = 2'-O-methyl modified nucleoside
taaatacaagtatcgattctt

SEQ ID NO: 2344 - RNA, 21 nt, synthetic construct
  source 1..21: mol_type = other RNA
  modified_base 1: mod_base = OTHER; note = 2'-O-methyl modified nucleoside with phosphorothioate linkage
  modified_base 2: mod_base = OTHER; note = 2'-fluoro modified nucleoside with phosphorothioate linkage
  modified_base 3: mod_base = OTHER; note = 2'-O-methyl modified nucleoside
  modified_base 4: mod_base = OTHER; note = 2'-fluoro modified nucleoside
  modified_base 5: mod_base = OTHER; note = 2'-O-methyl modified nucleoside
  modified_base 6: mod_base = OTHER; note = 2'-fluoro modified nucleoside
  modified_base 7: mod_base = OTHER; note = 2'-O-methyl modified nucleoside
  modified_base 8: mod_base = OTHER; note = 2'-fluoro modified nucleoside
  modified_base 9: mod_base = OTHER; note = 2'-O-methyl modified nucleoside
  modified_base 10: mod_base = OTHER; note = 2'-fluoro modified nucleoside
  modified_base 11: mod_base = OTHER; note = 2'-O-methyl modified nucleoside
  modified_base 12: mod_base = OTHER; note = 2'-fluoro modified nucleoside
  modified_base 13: mod_base = OTHER; note = 2'-O-methyl modified nucleoside
  modified_base 14: mod_base = OTHER; note = 2'-fluoro modified nucleoside
  modified_base 15: mod_base = OTHER; note = 2'-O-methyl modified nucleoside
  modified_base 16: mod_base = OTHER; note = 2'-fluoro modified nucleoside
  modified_base 17: mod_base = OTHER; note = 2'-O-methyl modified nucleoside
  modified_base 18: mod_base = OTHER; note = 2'-fluoro modified nucleoside
  modified_base 19: mod_base = OTHER; note = 2'-O-methyl modified nucleoside with phosphorothioate linkage
  modified_base 20: mod_base = OTHER; note = 2'-O-methyl modified nucleoside with phosphorothioate linkage
  modified_base 21: mod_base = OTHER; note = 2'-O-methyl modified nucleoside
tcacgtaacttggtactagtt

SEQ ID NO: 2345 - RNA, 21 nt, synthetic construct
  source 1..21: mol_type = other RNA
  modified_base 1: mod_base = OTHER; note = 2'-O-methyl modified nucleoside with phosphorothioate linkage
  modified_base 2: mod_base = OTHER; note = 2'-fluoro modified nucleoside with phosphorothioate linkage
  modified_base 3: mod_base = OTHER; note = 2'-O-methyl modified nucleoside
  modified_base 4: mod_base = OTHER; note = 2'-fluoro modified nucleoside
  modified_base 5: mod_base = OTHER; note = 2'-O-methyl modified nucleoside
  modified_base 6: mod_base = OTHER; note = 2'-fluoro modified nucleoside
  modified_base 7: mod_base = OTHER; note = 2'-O-methyl modified nucleoside
  modified_base 8: mod_base = OTHER; note = 2'-fluoro modified nucleoside
  modified_base 9: mod_base = OTHER; note = 2'-O-methyl modified nucleoside
  modified_base 10: mod_base = OTHER; note = 2'-fluoro modified nucleoside
  modified_base 11: mod_base = OTHER; note = 2'-O-methyl modified nucleoside
  modified_base 12: mod_base = OTHER; note = 2'-fluoro modified nucleoside
  modified_base 13: mod_base = OTHER; note = 2'-O-methyl modified nucleoside
  modified_base 14: mod_base = OTHER; note = 2'-fluoro modified nucleoside
  modified_base 15: mod_base = OTHER; note = 2'-O-methyl modified nucleoside
  modified_base 16: mod_base = OTHER; note = 2'-fluoro modified nucleoside
  modified_base 17: mod_base = OTHER; note = 2'-O-methyl modified nucleoside
  modified_base 18: mod_base = OTHER; note = 2'-fluoro modified nucleoside
  modified_base 19: mod_base = OTHER; note = 2'-O-methyl modified nucleoside with phosphorothioate linkage
  modified_base 20: mod_base = OTHER; note = 2'-O-methyl modified nucleoside with phosphorothioate linkage
  modified_base 21: mod_base = OTHER; note = 2'-O-methyl modified nucleoside
tgcacgtaacttggtactatt

SEQ ID NO: 2346 - RNA, 21 nt, synthetic construct
  source 1..21: mol_type = other RNA
  modified_base 1: mod_base = OTHER; note = 2'-O-methyl modified nucleoside with phosphorothioate linkage
  modified_base 2: mod_base = OTHER; note = 2'-fluoro modified nucleoside with phosphorothioate linkage
  modified_base 3: mod_base = OTHER; note = 2'-O-methyl modified nucleoside
  modified_base 4: mod_base = OTHER; note = 2'-fluoro modified nucleoside
  modified_base 5: mod_base = OTHER; note = 2'-O-methyl modified nucleoside
  modified_base 6: mod_base = OTHER; note = 2'-fluoro modified nucleoside
  modified_base 7: mod_base = OTHER; note = 2'-O-methyl modified nucleoside
  modified_base 8: mod_base = OTHER; note = 2'-fluoro modified nucleoside
  modified_base 9: mod_base = OTHER; note = 2'-O-methyl modified nucleoside
  modified_base 10: mod_base = OTHER; note = 2'-fluoro modified nucleoside
  modified_base 11: mod_base = OTHER; note = 2'-O-methyl modified nucleoside
  modified_base 12: mod_base = OTHER; note = 2'-fluoro modified nucleoside
  modified_base 13: mod_base = OTHER; note = 2'-O-methyl modified nucleoside
  modified_base 14: mod_base = OTHER; note = 2'-fluoro modified nucleoside
  modified_base 15: mod_base = OTHER; note = 2'-O-methyl modified nucleoside
  modified_base 16: mod_base = OTHER; note = 2'-fluoro modified nucleoside
  modified_base 17: mod_base = OTHER; note = 2'-O-methyl modified nucleoside
  modified_base 18: mod_base = OTHER; note = 2'-fluoro modified nucleoside
  modified_base 19: mod_base = OTHER; note = 2'-O-methyl modified nucleoside with phosphorothioate linkage
  modified_base 20: mod_base = OTHER; note = 2'-O-methyl modified nucleoside with phosphorothioate linkage
  modified_base 21: mod_base = OTHER; note = 2'-O-methyl modified nucleoside
ttgcacgtaacttggtacttt

SEQ ID NO: 2347 - RNA, 21 nt, synthetic construct
  source 1..21: mol_type = other RNA
  modified_base 1: mod_base = OTHER; note = 2'-O-methyl modified nucleoside with phosphorothioate linkage
  modified_base 2: mod_base = OTHER; note = 2'-fluoro modified nucleoside with phosphorothioate linkage
  modified_base 3: mod_base = OTHER; note = 2'-O-methyl modified nucleoside
  modified_base 4: mod_base = OTHER; note = 2'-fluoro modified nucleoside
  modified_base 5: mod_base = OTHER; note = 2'-O-methyl modified nucleoside
  modified_base 6: mod_base = OTHER; note = 2'-fluoro modified nucleoside
  modified_base 7: mod_base = OTHER; note = 2'-O-methyl modified nucleoside
  modified_base 8: mod_base = OTHER; note = 2'-fluoro modified nucleoside
  modified_base 9: mod_base = OTHER; note = 2'-O-methyl modified nucleoside
  modified_base 10: mod_base = OTHER; note = 2'-fluoro modified nucleoside
  modified_base 11: mod_base = OTHER; note = 2'-O-methyl modified nucleoside
  modified_base 12: mod_base = OTHER; note = 2'-fluoro modified nucleoside
  modified_base 13: mod_base = OTHER; note = 2'-O-methyl modified nucleoside
  modified_base 14: mod_base = OTHER; note = 2'-fluoro modified nucleoside
  modified_base 15: mod_base = OTHER; note = 2'-O-methyl modified nucleoside
  modified_base 16: mod_base = OTHER; note = 2'-fluoro modified nucleoside
  modified_base 17: mod_base = OTHER; note = 2'-O-methyl modified nucleoside
  modified_base 18: mod_base = OTHER; note = 2'-fluoro modified nucleoside
  modified_base 19: mod_base = OTHER; note = 2'-O-methyl modified nucleoside with phosphorothioate linkage
  modified_base 20: mod_base = OTHER; note = 2'-O-methyl modified nucleoside with phosphorothioate linkage
  modified_base 21: mod_base = OTHER; note = 2'-O-methyl modified nucleoside
tgtgcacgtaacttggtactt

SEQ ID NO: 2348 - RNA, 21 nt, synthetic construct
  source 1..21: mol_type = other RNA
  modified_base 1: mod_base = OTHER; note = 2'-O-methyl modified nucleoside with phosphorothioate linkage
  modified_base 2: mod_base = OTHER; note = 2'-fluoro modified nucleoside with phosphorothioate linkage
  modified_base 3: mod_base = OTHER; note = 2'-O-methyl modified nucleoside
  modified_base 4: mod_base = OTHER; note = 2'-fluoro modified nucleoside
  modified_base 5: mod_base = OTHER; note = 2'-O-methyl modified nucleoside
  modified_base 6: mod_base = OTHER; note = 2'-fluoro modified nucleoside
  modified_base 7: mod_base = OTHER; note = 2'-O-methyl modified nucleoside
  modified_base 8: mod_base = OTHER; note = 2'-fluoro modified nucleoside
  modified_base 9: mod_base = OTHER; note = 2'-O-methyl modified nucleoside
  modified_base 10: mod_base = OTHER; note = 2'-fluoro modified nucleoside
  modified_base 11: mod_base = OTHER; note = 2'-O-methyl modified nucleoside
  modified_base 12: mod_base = OTHER; note = 2'-fluoro modified nucleoside
  modified_base 13: mod_base = OTHER; note = 2'-O-methyl modified nucleoside
  modified_base 14: mod_base = OTHER; note = 2'-fluoro modified nucleoside
  modified_base 15: mod_base = OTHER; note = 2'-O-methyl modified nucleoside
  modified_base 16: mod_base = OTHER; note = 2'-fluoro modified nucleoside
  modified_base 17: mod_base = OTHER; note = 2'-O-methyl modified nucleoside
  modified_base 18: mod_base = OTHER; note = 2'-fluoro modified nucleoside
  modified_base 19: mod_base = OTHER; note = 2'-O-methyl modified nucleoside with phosphorothioate linkage
  modified_base 20: mod_base = OTHER; note = 2'-O-methyl modified nucleoside with phosphorothioate linkage
  modified_base 21: mod_base = OTHER; note = 2'-O-methyl modified nucleoside
tggtgcacgtaacttggtatt

SEQ ID NO: 2349 - RNA, 21 nt, synthetic construct
  source 1..21: mol_type = other RNA
  modified_base 1: mod_base = OTHER; note = 2'-O-methyl modified nucleoside with phosphorothioate linkage
  modified_base 2: mod_base = OTHER; note = 2'-fluoro modified nucleoside with phosphorothioate linkage
  modified_base 3: mod_base = OTHER; note = 2'-O-methyl modified nucleoside
  modified_base 4: mod_base = OTHER; note = 2'-fluoro modified nucleoside
  modified_base 5: mod_base = OTHER; note = 2'-O-methyl modified nucleoside
  modified_base 6: mod_base = OTHER; note = 2'-fluoro modified nucleoside
  modified_base 7: mod_base = OTHER; note = 2'-O-methyl modified nucleoside
  modified_base 8: mod_base = OTHER; note = 2'-fluoro modified nucleoside
  modified_base 9: mod_base = OTHER; note = 2'-O-methyl modified nucleoside
  modified_base 10: mod_base = OTHER; note = 2'-fluoro modified nucleoside
  modified_base 11: mod_base = OTHER; note = 2'-O-methyl modified nucleoside
  modified_base 12: mod_base = OTHER; note = 2'-fluoro modified nucleoside
  modified_base 13: mod_base = OTHER; note = 2'-O-methyl modified nucleoside
  modified_base 14: mod_base = OTHER; note = 2'-fluoro modified nucleoside
  modified_base 15: mod_base = OTHER; note = 2'-O-methyl modified nucleoside
  modified_base 16: mod_base = OTHER; note = 2'-fluoro modified nucleoside
  modified_base 17: mod_base = OTHER; note = 2'-O-methyl modified nucleoside
  modified_base 18: mod_base = OTHER; note = 2'-fluoro modified nucleoside
  modified_base 19: mod_base = OTHER; note = 2'-O-methyl modified nucleoside with phosphorothioate linkage
  modified_base 20: mod_base = OTHER; note = 2'-O-methyl modified nucleoside with phosphorothioate linkage
  modified_base 21: mod_base = OTHER; note = 2'-O-methyl modified nucleoside
tttggtgcacgtaacttggtt

SEQ ID NO: 2350 - RNA, 21 nt, synthetic construct
  source 1..21: mol_type = other RNA
  modified_base 1: mod_base = OTHER; note = 2'-O-methyl modified nucleoside with phosphorothioate linkage
  modified_base 2: mod_base = OTHER; note = 2'-fluoro modified nucleoside with phosphorothioate linkage
  modified_base 3: mod_base = OTHER; note = 2'-O-methyl modified nucleoside
  modified_base 4: mod_base = OTHER; note = 2'-fluoro modified nucleoside
  modified_base 5: mod_base = OTHER; note = 2'-O-methyl modified nucleoside
  modified_base 6: mod_base = OTHER; note = 2'-fluoro modified nucleoside
  modified_base 7: mod_base = OTHER; note = 2'-O-methyl modified nucleoside
  modified_base 8: mod_base = OTHER; note = 2'-fluoro modified nucleoside
  modified_base 9: mod_base = OTHER; note = 2'-O-methyl modified nucleoside
  modified_base 10: mod_base = OTHER; note = 2'-fluoro modified nucleoside
  modified_base 11: mod_base = OTHER; note = 2'-O-methyl modified nucleoside
  modified_base 12: mod_base = OTHER; note = 2'-fluoro modified nucleoside
  modified_base 13: mod_base = OTHER; note = 2'-O-methyl modified nucleoside
  modified_base 14: mod_base = OTHER; note = 2'-fluoro modified nucleoside
  modified_base 15: mod_base = OTHER; note = 2'-O-methyl modified nucleoside
  modified_base 16: mod_base = OTHER; note = 2'-fluoro modified nucleoside
  modified_base 17: mod_base = OTHER; note = 2'-O-methyl modified nucleoside
  modified_base 18: mod_base = OTHER; note = 2'-fluoro modified nucleoside
  modified_base 19: mod_base = OTHER; note = 2'-O-methyl modified nucleoside with phosphorothioate linkage
  modified_base 20: mod_base = OTHER; note = 2'-O-methyl modified nucleoside with phosphorothioate linkage
  modified_base 21: mod_base = OTHER; note = 2'-O-methyl modified nucleoside
ttttggtgcacgtaacttgtt

SEQ ID NO: 2351 - RNA, 21 nt, synthetic construct
  source 1..21: mol_type = other RNA
  modified_base 1: mod_base = OTHER; note = 2'-O-methyl modified nucleoside with phosphorothioate linkage
  modified_base 2: mod_base = OTHER; note = 2'-fluoro modified nucleoside with phosphorothioate linkage
  modified_base 3: mod_base = OTHER; note = 2'-O-methyl modified nucleoside
  modified_base 4: mod_base = OTHER; note = 2'-fluoro modified nucleoside
  modified_base 5: mod_base = OTHER; note = 2'-O-methyl modified nucleoside
  modified_base 6: mod_base = OTHER; note = 2'-fluoro modified nucleoside
  modified_base 7: mod_base = OTHER; note = 2'-O-methyl modified nucleoside
  modified_base 8: mod_base = OTHER; note = 2'-fluoro modified nucleoside
  modified_base 9: mod_base = OTHER; note = 2'-O-methyl modified nucleoside
  modified_base 10: mod_base = OTHER; note = 2'-fluoro modified nucleoside
  modified_base 11: mod_base = OTHER; note = 2'-O-methyl modified nucleoside
  modified_base 12: mod_base = OTHER; note = 2'-fluoro modified nucleoside
  modified_base 13: mod_base = OTHER; note = 2'-O-methyl modified nucleoside
  modified_base 14: mod_base = OTHER; note = 2'-fluoro modified nucleoside
  modified_base 15: mod_base = OTHER; note = 2'-O-methyl modified nucleoside
  modified_base 16: mod_base = OTHER; note = 2'-fluoro modified nucleoside
  modified_base 17: mod_base = OTHER; note = 2'-O-methyl modified nucleoside
  modified_base 18: mod_base = OTHER; note = 2'-fluoro modified nucleoside
  modified_base 19: mod_base = OTHER; note = 2'-O-methyl modified nucleoside with phosphorothioate linkage
  modified_base 20: mod_base = OTHER; note = 2'-O-methyl modified nucleoside with phosphorothioate linkage
  modified_base 21: mod_base = OTHER; note = 2'-O-methyl modified nucleoside
tatttggtgcacgtaactttt

SEQ ID NO: 2352 - RNA, 21 nt, synthetic construct
  source 1..21: mol_type = other RNA
  modified_base 1: mod_base = OTHER; note = 2'-O-methyl modified nucleoside with phosphorothioate linkage
  modified_base 2: mod_base = OTHER; note = 2'-fluoro modified nucleoside with phosphorothioate linkage
  modified_base 3: mod_base = OTHER; note = 2'-O-methyl modified nucleoside
  modified_base 4: mod_base = OTHER; note = 2'-fluoro modified nucleoside
  modified_base 5: mod_base = OTHER; note = 2'-O-methyl modified nucleoside
  modified_base 6: mod_base = OTHER; note = 2'-fluoro modified nucleoside
  modified_base 7: mod_base = OTHER; note = 2'-O-methyl modified nucleoside
  modified_base 8: mod_base = OTHER; note = 2'-fluoro modified nucleoside
  modified_base 9: mod_base = OTHER; note = 2'-O-methyl modified nucleoside
  modified_base 10: mod_base = OTHER; note = 2'-fluoro modified nucleoside
  modified_base 11: mod_base = OTHER; note = 2'-O-methyl modified nucleoside
  modified_base 12: mod_base = OTHER; note = 2'-fluoro modified nucleoside
  modified_base 13: mod_base = OTHER; note = 2'-O-methyl modified nucleoside
  modified_base 14: mod_base = OTHER; note = 2'-fluoro modified nucleoside
  modified_base 15: mod_base = OTHER; note = 2'-O-methyl modified nucleoside
  modified_base 16: mod_base = OTHER; note = 2'-fluoro modified nucleoside
  modified_base 17: mod_base = OTHER; note = 2'-O-methyl modified nucleoside
  modified_base 18: mod_base = OTHER; note = 2'-fluoro modified nucleoside
  modified_base 19: mod_base = OTHER; note = 2'-O-methyl modified nucleoside with phosphorothioate linkage
  modified_base 20: mod_base = OTHER; note = 2'-O-methyl modified nucleoside with phosphorothioate linkage
  modified_base 21: mod_base = OTHER; note = 2'-O-methyl modified nucleoside
ttaatttggtgcacgtaactt

SEQ ID NO: 2353 - RNA, 21 nt, synthetic construct
  source 1..21: mol_type = other RNA
  modified_base 1: mod_base = OTHER; note = 2'-O-methyl modified nucleoside with phosphorothioate linkage
  modified_base 2: mod_base = OTHER; note = 2'-fluoro modified nucleoside with phosphorothioate linkage
  modified_base 3: mod_base = OTHER; note = 2'-O-methyl modified nucleoside
  modified_base 4: mod_base = OTHER; note = 2'-fluoro modified nucleoside
  modified_base 5: mod_base = OTHER; note = 2'-O-methyl modified nucleoside
  modified_base 6: mod_base = OTHER; note = 2'-fluoro modified nucleoside
  modified_base 7: mod_base = OTHER; note = 2'-O-methyl modified nucleoside
  modified_base 8: mod_base = OTHER; note = 2'-fluoro modified nucleoside
  modified_base 9: mod_base = OTHER; note = 2'-O-methyl modified nucleoside
  modified_base 10: mod_base = OTHER; note = 2'-fluoro modified nucleoside
  modified_base 11: mod_base = OTHER; note = 2'-O-methyl modified nucleoside
  modified_base 12: mod_base = OTHER; note = 2'-fluoro modified nucleoside
  modified_base 13: mod_base = OTHER; note = 2'-O-methyl modified nucleoside
  modified_base 14: mod_base = OTHER; note = 2'-fluoro modified nucleoside
  modified_base 15: mod_base = OTHER; note = 2'-O-methyl modified nucleoside
  modified_base 16: mod_base = OTHER; note = 2'-fluoro modified nucleoside
  modified_base 17: mod_base = OTHER; note = 2'-O-methyl modified nucleoside
  modified_base 18: mod_base = OTHER; note = 2'-fluoro modified nucleoside
  modified_base 19: mod_base = OTHER; note = 2'-O-methyl modified nucleoside with phosphorothioate linkage
  modified_base 20: mod_base = OTHER; note = 2'-O-methyl modified nucleoside with phosphorothioate linkage
  modified_base 21: mod_base = OTHER; note = 2'-O-methyl modified nucleoside
tataatttggtgcacgtaatt

SEQ ID NO: 2354 - RNA, 21 nt, synthetic construct
  source 1..21: mol_type = other RNA
  modified_base 1: mod_base = OTHER; note = 2'-O-methyl modified nucleoside with phosphorothioate linkage
  modified_base 2: mod_base = OTHER; note = 2'-fluoro modified nucleoside with phosphorothioate linkage
  modified_base 3: mod_base = OTHER; note = 2'-O-methyl modified nucleoside
  modified_base 4: mod_base = OTHER; note = 2'-fluoro modified nucleoside
  modified_base 5: mod_base = OTHER; note = 2'-O-methyl modified nucleoside
  modified_base 6: mod_base = OTHER; note = 2'-fluoro modified nucleoside
  modified_base 7: mod_base = OTHER; note = 2'-O-methyl modified nucleoside
  modified_base 8: mod_base = OTHER; note = 2'-fluoro modified nucleoside
  modified_base 9: mod_base = OTHER; note = 2'-O-methyl modified nucleoside
  modified_base 10: mod_base = OTHER; note = 2'-fluoro modified nucleoside
  modified_base 11: mod_base = OTHER; note = 2'-O-methyl modified nucleoside
  modified_base 12: mod_base = OTHER; note = 2'-fluoro modified nucleoside
  modified_base 13: mod_base = OTHER; note = 2'-O-methyl modified nucleoside
  modified_base 14: mod_base = OTHER; note = 2'-fluoro modified nucleoside
  modified_base 15: mod_base = OTHER; note = 2'-O-methyl modified nucleoside
  modified_base 16: mod_base = OTHER; note = 2'-fluoro modified nucleoside
  modified_base 17: mod_base = OTHER; note = 2'-O-methyl modified nucleoside
  modified_base 18: mod_base = OTHER; note = 2'-fluoro modified nucleoside
  modified_base 19: mod_base = OTHER; note = 2'-O-methyl modified nucleoside with phosphorothioate linkage
  modified_base 20: mod_base = OTHER; note = 2'-O-methyl modified nucleoside with phosphorothioate linkage
  modified_base 21: mod_base = OTHER; note = 2'-O-methyl modified nucleoside
tatattacttttgagtctttt

SEQ ID NO: 2355 - RNA, 21 nt, synthetic construct
  source 1..21: mol_type = other RNA
  modified_base 1: mod_base = OTHER; note = 2'-O-methyl modified nucleoside with phosphorothioate linkage
  modified_base 2: mod_base = OTHER; note = 2'-fluoro modified nucleoside with phosphorothioate linkage
  modified_base 3: mod_base = OTHER; note = 2'-O-methyl modified nucleoside
  modified_base 4: mod_base = OTHER; note = 2'-fluoro modified nucleoside
  modified_base 5: mod_base = OTHER; note = 2'-O-methyl modified nucleoside
  modified_base 6: mod_base = OTHER; note = 2'-fluoro modified nucleoside
  modified_base 7: mod_base = OTHER; note = 2'-O-methyl modified nucleoside
  modified_base 8: mod_base = OTHER; note = 2'-fluoro modified nucleoside
  modified_base 9: mod_base = OTHER; note = 2'-O-methyl modified nucleoside
  modified_base 10: mod_base = OTHER; note = 2'-fluoro modified nucleoside
  modified_base 11: mod_base = OTHER; note = 2'-O-methyl modified nucleoside
  modified_base 12: mod_base = OTHER; note = 2'-fluoro modified nucleoside
  modified_base 13: mod_base = OTHER; note = 2'-O-methyl modified nucleoside
  modified_base 14: mod_base = OTHER; note = 2'-fluoro modified nucleoside
  modified_base 15: mod_base = OTHER; note = 2'-O-methyl modified nucleoside
  modified_base 16: mod_base = OTHER; note = 2'-fluoro modified nucleoside
  modified_base 17: mod_base = OTHER; note = 2'-O-methyl modified nucleoside
  modified_base 18: mod_base = OTHER; note = 2'-fluoro modified nucleoside
  modified_base 19: mod_base = OTHER; note = 2'-O-methyl modified nucleoside with phosphorothioate linkage
  modified_base 20: mod_base = OTHER; note = 2'-O-methyl modified nucleoside with phosphorothioate linkage
  modified_base 21: mod_base = OTHER; note = 2'-O-methyl modified nucleoside
tgactttttagtagatttttt

SEQ ID NO: 2356 - RNA, 21 nt, synthetic construct
  source 1..21: mol_type = other RNA
  modified_base 1: mod_base = OTHER; note = 2'-O-methyl modified nucleoside with phosphorothioate linkage
  modified_base 2: mod_base = OTHER; note = 2'-fluoro modified nucleoside with phosphorothioate linkage
  modified_base 3: mod_base = OTHER; note = 2'-O-methyl modified nucleoside
  modified_base 4: mod_base = OTHER; note = 2'-fluoro modified nucleoside
  modified_base 5: mod_base = OTHER; note = 2'-O-methyl modified nucleoside
  modified_base 6: mod_base = OTHER; note = 2'-fluoro modified nucleoside
  modified_base 7: mod_base = OTHER; note = 2'-O-methyl modified nucleoside
  modified_base 8: mod_base = OTHER; note = 2'-fluoro modified nucleoside
  modified_base 9: mod_base = OTHER; note = 2'-O-methyl modified nucleoside
  modified_base 10: mod_base = OTHER; note = 2'-fluoro modified nucleoside
  modified_base 11: mod_base = OTHER; note = 2'-O-methyl modified nucleoside
  modified_base 12: mod_base = OTHER; note = 2'-fluoro modified nucleoside
  modified_base 13: mod_base = OTHER; note = 2'-O-methyl modified nucleoside
  modified_base 14: mod_base = OTHER; note = 2'-fluoro modified nucleoside
  modified_base 15: mod_base = OTHER; note = 2'-O-methyl modified nucleoside
  modified_base 16: mod_base = OTHER; note = 2'-fluoro modified nucleoside
  modified_base 17: mod_base = OTHER; note = 2'-O-methyl modified nucleoside
  modified_base 18: mod_base = OTHER; note = 2'-fluoro modified nucleoside
  modified_base 19: mod_base = OTHER; note = 2'-O-methyl modified nucleoside with phosphorothioate linkage
  modified_base 20: mod_base = OTHER; note = 2'-O-methyl modified nucleoside with phosphorothioate linkage
  modified_base 21: mod_base = OTHER; note = 2'-O-methyl modified nucleoside
tcagagactttttagtagatt

SEQ ID NO: 2357 - RNA, 21 nt, synthetic construct
  source 1..21: mol_type = other RNA
  modified_base 1: mod_base = OTHER; note = 2'-O-methyl modified nucleoside with phosphorothioate linkage
  modified_base 2: mod_base = OTHER; note = 2'-fluoro modified nucleoside with phosphorothioate linkage
  modified_base 3: mod_base = OTHER; note = 2'-O-methyl modified nucleoside
  modified_base 4: mod_base = OTHER; note = 2'-fluoro modified nucleoside
  modified_base 5: mod_base = OTHER; note = 2'-O-methyl modified nucleoside
  modified_base 6: mod_base = OTHER; note = 2'-fluoro modified nucleoside
  modified_base 7: mod_base = OTHER; note = 2'-O-methyl modified nucleoside
  modified_base 8: mod_base = OTHER; note = 2'-fluoro modified nucleoside
  modified_base 9: mod_base = OTHER; note = 2'-O-methyl modified nucleoside
  modified_base 10: mod_base = OTHER; note = 2'-fluoro modified nucleoside
  modified_base 11: mod_base = OTHER; note = 2'-O-methyl modified nucleoside
  modified_base 12: mod_base = OTHER; note = 2'-fluoro modified nucleoside
  modified_base 13: mod_base = OTHER; note = 2'-O-methyl modified nucleoside
  modified_base 14: mod_base = OTHER; note = 2'-fluoro modified nucleoside
  modified_base 15: mod_base = OTHER; note = 2'-O-methyl modified nucleoside
  modified_base 16: mod_base = OTHER; note = 2'-fluoro modified nucleoside
  modified_base 17: mod_base = OTHER; note = 2'-O-methyl modified nucleoside
  modified_base 18: mod_base = OTHER; note = 2'-fluoro modified nucleoside
  modified_base 19: mod_base = OTHER; note = 2'-O-methyl modified nucleoside with phosphorothioate linkage
  modified_base 20: mod_base = OTHER; note = 2'-O-methyl modified nucleoside with phosphorothioate linkage
  modified_base 21: mod_base = OTHER; note = 2'-O-methyl modified nucleoside
ttatctagccccgtcttcatt

SEQ ID NO: 2358 - RNA, 21 nt, synthetic construct
  source 1..21: mol_type = other RNA
  modified_base 1: mod_base = OTHER; note = 2'-O-methyl modified nucleoside with phosphorothioate linkage
  modified_base 2: mod_base = OTHER; note = 2'-fluoro modified nucleoside with phosphorothioate linkage
  modified_base 3: mod_base = OTHER; note = 2'-O-methyl modified nucleoside
  modified_base 4: mod_base = OTHER; note = 2'-fluoro modified nucleoside
  modified_base 5: mod_base = OTHER; note = 2'-O-methyl modified nucleoside
  modified_base 6: mod_base = OTHER; note = 2'-fluoro modified nucleoside
  modified_base 7: mod_base = OTHER; note = 2'-O-methyl modified nucleoside
  modified_base 8: mod_base = OTHER; note = 2'-fluoro modified nucleoside
  modified_base 9: mod_base = OTHER; note = 2'-O-methyl modified nucleoside
  modified_base 10: mod_base = OTHER; note = 2'-fluoro modified nucleoside
  modified_base 11: mod_base = OTHER; note = 2'-O-methyl modified nucleoside
  modified_base 12: mod_base = OTHER; note = 2'-fluoro modified nucleoside
  modified_base 13: mod_base = OTHER; note = 2'-O-methyl modified nucleoside
  modified_base 14: mod_base = OTHER; note = 2'-fluoro modified nucleoside
  modified_base 15: mod_base = OTHER; note = 2'-O-methyl modified nucleoside
  modified_base 16: mod_base = OTHER; note = 2'-fluoro modified nucleoside
  modified_base 17: mod_base = OTHER; note = 2'-O-methyl modified nucleoside
  modified_base 18: mod_base = OTHER; note = 2'-fluoro modified nucleoside
  modified_base 19: mod_base = OTHER; note = 2'-O-methyl modified nucleoside with phosphorothioate linkage
  modified_base 20: mod_base = OTHER; note = 2'-O-methyl modified nucleoside with phosphorothioate linkage
  modified_base 21: mod_base = OTHER; note = 2'-O-methyl modified nucleoside
tgtttctcccaatatctagtt

SEQ ID NO: 2359 - RNA, 21 nt, synthetic construct
  source 1..21: mol_type = other RNA
  modified_base 1: mod_base = OTHER; note = 2'-O-methyl modified nucleoside with phosphorothioate linkage
  modified_base 2: mod_base = OTHER; note = 2'-fluoro modified nucleoside with phosphorothioate linkage
  modified_base 3: mod_base = OTHER; note = 2'-O-methyl modified nucleoside
  modified_base 4: mod_base = OTHER; note = 2'-fluoro modified nucleoside
  modified_base 5: mod_base = OTHER; note = 2'-O-methyl modified nucleoside
  modified_base 6: mod_base = OTHER; note = 2'-fluoro modified nucleoside
  modified_base 7: mod_base = OTHER; note = 2'-O-methyl modified nucleoside
  modified_base 8: mod_base = OTHER; note = 2'-fluoro modified nucleoside
  modified_base 9: mod_base = OTHER; note = 2'-O-methyl modified nucleoside
  modified_base 10: mod_base = OTHER; note = 2'-fluoro modified nucleoside
  modified_base 11: mod_base = OTHER; note = 2'-O-methyl modified nucleoside
  modified_base 12: mod_base = OTHER; note = 2'-fluoro modified nucleoside
  modified_base 13: mod_base = OTHER; note = 2'-O-methyl modified nucleoside
  modified_base 14: mod_base = OTHER; note = 2'-fluoro modified nucleoside
  modified_base 15: mod_base = OTHER; note = 2'-O-methyl modified nucleoside
  modified_base 16: mod_base = OTHER; note = 2'-fluoro modified nucleoside
  modified_base 17: mod_base = OTHER; note = 2'-O-methyl modified nucleoside
  modified_base 18: mod_base = OTHER; note = 2'-fluoro modified nucleoside
  modified_base 19: mod_base = OTHER; note = 2'-O-methyl modified nucleoside with phosphorothioate linkage
  modified_base 20: mod_base = OTHER; note = 2'-O-methyl modified nucleoside with phosphorothioate linkage
  modified_base 21: mod_base = OTHER; note = 2'-O-methyl modified nucleoside
tcactttcaccgttctgcttt

SEQ ID NO: 2360 - RNA, 21 nt, synthetic construct
  source 1..21: mol_type = other RNA
  modified_base 1: mod_base = OTHER; note = 2'-O-methyl modified nucleoside with phosphorothioate linkage
  modified_base 2: mod_base = OTHER; note = 2'-fluoro modified nucleoside with phosphorothioate linkage
  modified_base 3: mod_base = OTHER; note = 2'-O-methyl modified nucleoside
  modified_base 4: mod_base = OTHER; note = 2'-fluoro modified nucleoside
  modified_base 5: mod_base = OTHER; note = 2'-O-methyl modified nucleoside
  modified_base 6: mod_base = OTHER; note = 2'-fluoro modified nucleoside
  modified_base 7: mod_base = OTHER; note = 2'-O-methyl modified nucleoside
  modified_base 8: mod_base = OTHER; note = 2'-fluoro modified nucleoside
  modified_base 9: mod_base = OTHER; note = 2'-O-methyl modified nucleoside
  modified_base 10: mod_base = OTHER; note = 2'-fluoro modified nucleoside
  modified_base 11: mod_base = OTHER; note = 2'-O-methyl modified nucleoside
  modified_base 12: mod_base = OTHER; note = 2'-fluoro modified nucleoside
  modified_base 13: mod_base = OTHER; note = 2'-O-methyl modified nucleoside
  modified_base 14: mod_base = OTHER; note = 2'-fluoro modified nucleoside
  modified_base 15: mod_base = OTHER; note = 2'-O-methyl modified nucleoside
  modified_base 16: mod_base = OTHER; note = 2'-fluoro modified nucleoside
  modified_base 17: mod_base = OTHER; note = 2'-O-methyl modified nucleoside
  modified_base 18: mod_base = OTHER; note = 2'-fluoro modified nucleoside
  modified_base 19: mod_base = OTHER; note = 2'-O-methyl modified nucleoside with phosphorothioate linkage
  modified_base 20: mod_base = OTHER; note = 2'-O-methyl modified nucleoside with phosphorothioate linkage
  modified_base 21: mod_base = OTHER; note = 2'-O-methyl modified nucleoside
tcaatgtatctcccacttttt

SEQ ID NO: 2361 - RNA, 21 nt, synthetic construct
  source 1..21: mol_type = other RNA
  modified_base 1: mod_base = OTHER; note = 2'-O-methyl modified nucleoside with phosphorothioate linkage
  modified_base 2: mod_base = OTHER; note = 2'-fluoro modified nucleoside with phosphorothioate linkage
  modified_base 3: mod_base = OTHER; note = 2'-O-methyl modified nucleoside
  modified_base 4: mod_base = OTHER; note = 2'-fluoro modified nucleoside
  modified_base 5: mod_base = OTHER; note = 2'-O-methyl modified nucleoside
  modified_base 6: mod_base = OTHER; note = 2'-fluoro modified nucleoside
  modified_base 7: mod_base = OTHER; note = 2'-O-methyl modified nucleoside
  modified_base 8: mod_base = OTHER; note = 2'-fluoro modified nucleoside
  modified_base 9: mod_base = OTHER; note = 2'-O-methyl modified nucleoside
  modified_base 10: mod_base = OTHER; note = 2'-fluoro modified nucleoside
  modified_base 11: mod_base = OTHER; note = 2'-O-methyl modified nucleoside
  modified_base 12: mod_base = OTHER; note = 2'-fluoro modified nucleoside
  modified_base 13: mod_base = OTHER; note = 2'-O-methyl modified nucleoside
  modified_base 14: mod_base = OTHER; note = 2'-fluoro modified nucleoside
  modified_base 15: mod_base = OTHER; note = 2'-O-methyl modified nucleoside
  modified_base 16: mod_base = OTHER; note = 2'-fluoro modified nucleoside
  modified_base 17: mod_base = OTHER; note = 2'-O-methyl modified nucleoside
  modified_base 18: mod_base = OTHER; note = 2'-fluoro modified nucleoside
  modified_base 19: mod_base = OTHER; note = 2'-O-methyl modified nucleoside with phosphorothioate linkage
  modified_base 20: mod_base = OTHER; note = 2'-O-methyl modified nucleoside with phosphorothioate linkage
  modified_base 21: mod_base = OTHER; note = 2'-O-methyl modified nucleoside
tccaatgtatctcccactttt

SEQ ID NO: 2362 - RNA, 21 nt, synthetic construct
  source 1..21: mol_type = other RNA
  modified_base 1: mod_base = OTHER; note = 2'-O-methyl modified nucleoside with phosphorothioate linkage
  modified_base 2: mod_base = OTHER; note = 2'-fluoro modified nucleoside with phosphorothioate linkage
  modified_base 3: mod_base = OTHER; note = 2'-O-methyl modified nucleoside
  modified_base 4: mod_base = OTHER; note = 2'-fluoro modified nucleoside
  modified_base 5: mod_base = OTHER; note = 2'-O-methyl modified nucleoside
  modified_base 6: mod_base = OTHER; note = 2'-fluoro modified nucleoside
  modified_base 7: mod_base = OTHER; note = 2'-O-methyl modified nucleoside
  modified_base 8: mod_base = OTHER; note = 2'-fluoro modified nucleoside
  modified_base 9: mod_base = OTHER; note = 2'-O-methyl modified nucleoside
  modified_base 10: mod_base = OTHER; note = 2'-fluoro modified nucleoside
  modified_base 11: mod_base = OTHER; note = 2'-O-methyl modified nucleoside
  modified_base 12: mod_base = OTHER; note = 2'-fluoro modified nucleoside
  modified_base 13: mod_base = OTHER; note = 2'-O-methyl modified nucleoside
  modified_base 14: mod_base = OTHER; note = 2'-fluoro modified nucleoside
  modified_base 15: mod_base = OTHER; note = 2'-O-methyl modified nucleoside
  modified_base 16: mod_base = OTHER; note = 2'-fluoro modified nucleoside
  modified_base 17: mod_base = OTHER; note = 2'-O-methyl modified nucleoside
  modified_base 18: mod_base = OTHER; note = 2'-fluoro modified nucleoside
  modified_base 19: mod_base = OTHER; note = 2'-O-methyl modified nucleoside with phosphorothioate linkage
  modified_base 20: mod_base = OTHER; note = 2'-O-methyl modified nucleoside with phosphorothioate linkage
  modified_base 21: mod_base = OTHER; note = 2'-O-methyl modified nucleoside
ttccaatgtatctcccacttt

SEQ ID NO: 2363 - RNA, 21 nt, synthetic construct
  source 1..21: mol_type = other RNA
  modified_base 1: mod_base = OTHER; note = 2'-O-methyl modified nucleoside with phosphorothioate linkage
  modified_base 2: mod_base = OTHER; note = 2'-fluoro modified nucleoside with phosphorothioate linkage
  modified_base 3: mod_base = OTHER; note = 2'-O-methyl modified nucleoside
  modified_base 4: mod_base = OTHER; note = 2'-fluoro modified nucleoside
  modified_base 5: mod_base = OTHER; note = 2'-O-methyl modified nucleoside
  modified_base 6: mod_base = OTHER; note = 2'-fluoro modified nucleoside
  modified_base 7: mod_base = OTHER; note = 2'-O-methyl modified nucleoside
  modified_base 8: mod_base = OTHER; note = 2'-fluoro modified nucleoside
  modified_base 9: mod_base = OTHER; note = 2'-O-methyl modified nucleoside
  modified_base 10: mod_base = OTHER; note = 2'-fluoro modified nucleoside
  modified_base 11: mod_base = OTHER; note = 2'-O-methyl modified nucleoside
  modified_base 12: mod_base = OTHER; note = 2'-fluoro modified nucleoside
  modified_base 13: mod_base = OTHER; note = 2'-O-methyl modified nucleoside
  modified_base 14: mod_base = OTHER; note = 2'-fluoro modified nucleoside
  modified_base 15: mod_base = OTHER; note = 2'-O-methyl modified nucleoside
  modified_base 16: mod_base = OTHER; note = 2'-fluoro modified nucleoside
  modified_base 17: mod_base = OTHER; note = 2'-O-methyl modified nucleoside
  modified_base 18: mod_base = OTHER; note = 2'-fluoro modified nucleoside
  modified_base 19: mod_base = OTHER; note = 2'-O-methyl modified nucleoside with phosphorothioate linkage
  modified_base 20: mod_base = OTHER; note = 2'-O-methyl modified nucleoside with phosphorothioate linkage
  modified_base 21: mod_base = OTHER; note = 2'-O-methyl modified nucleoside
tgatccaatgtatctcccatt

SEQ ID NO: 2364 - RNA, 21 nt, synthetic construct
  source 1..21: mol_type = other RNA
  modified_base 1: mod_base = OTHER; note = 2'-O-methyl modified nucleoside with phosphorothioate linkage
  modified_base 2: mod_base = OTHER; note = 2'-fluoro modified nucleoside with phosphorothioate linkage
  modified_base 3: mod_base = OTHER; note = 2'-O-methyl modified nucleoside
  modified_base 4: mod_base = OTHER; note = 2'-fluoro modified nucleoside
  modified_base 5: mod_base = OTHER; note = 2'-O-methyl modified nucleoside
  modified_base 6: mod_base = OTHER; note = 2'-fluoro modified nucleoside
  modified_base 7: mod_base = OTHER; note = 2'-O-methyl modified nucleoside
  modified_base 8: mod_base = OTHER; note = 2'-fluoro modified nucleoside
  modified_base 9: mod_base = OTHER; note = 2'-O-methyl modified nucleoside
  modified_base 10: mod_base = OTHER; note = 2'-fluoro modified nucleoside
  modified_base 11: mod_base = OTHER; note = 2'-O-methyl modified nucleoside
  modified_base 12: mod_base = OTHER; note = 2'-fluoro modified nucleoside
  modified_base 13: mod_base = OTHER; note = 2'-O-methyl modified nucleoside
  modified_base 14: mod_base = OTHER; note = 2'-fluoro modified nucleoside
  modified_base 15: mod_base = OTHER; note = 2'-O-methyl modified nucleoside
  modified_base 16: mod_base = OTHER; note = 2'-fluoro modified nucleoside
  modified_base 17: mod_base = OTHER; note = 2'-O-methyl modified nucleoside
  modified_base 18: mod_base = OTHER; note = 2'-fluoro modified nucleoside
  modified_base 19: mod_base = OTHER; note = 2'-O-methyl modified nucleoside with phosphorothioate linkage
  modified_base 20: mod_base = OTHER; note = 2'-O-methyl modified nucleoside with phosphorothioate linkage
  modified_base 21: mod_base = OTHER; note = 2'-O-methyl modified nucleoside
ttgagaagatccaatgtattt

SEQ ID NO: 2365 - RNA, 21 nt, synthetic construct
  source 1..21: mol_type = other RNA
  modified_base 1: mod_base = OTHER; note = 2'-O-methyl modified nucleoside with phosphorothioate linkage
  modified_base 2: mod_base = OTHER; note = 2'-fluoro modified nucleoside with phosphorothioate linkage
  modified_base 3: mod_base = OTHER; note = 2'-O-methyl modified nucleoside
  modified_base 4: mod_base = OTHER; note = 2'-fluoro modified nucleoside
  modified_base 5: mod_base = OTHER; note = 2'-O-methyl modified nucleoside
  modified_base 6: mod_base = OTHER; note = 2'-fluoro modified nucleoside
  modified_base 7: mod_base = OTHER; note = 2'-O-methyl modified nucleoside
  modified_base 8: mod_base = OTHER; note = 2'-fluoro modified nucleoside
  modified_base 9: mod_base = OTHER; note = 2'-O-methyl modified nucleoside
  modified_base 10: mod_base = OTHER; note = 2'-fluoro modified nucleoside
  modified_base 11: mod_base = OTHER; note = 2'-O-methyl modified nucleoside
  modified_base 12: mod_base = OTHER; note = 2'-fluoro modified nucleoside
  modified_base 13: mod_base = OTHER; note = 2'-O-methyl modified nucleoside
  modified_base 14: mod_base = OTHER; note = 2'-fluoro modified nucleoside
  modified_base 15: mod_base = OTHER; note = 2'-O-methyl modified nucleoside
  modified_base 16: mod_base = OTHER; note = 2'-fluoro modified nucleoside
  modified_base 17: mod_base = OTHER; note = 2'-O-methyl modified nucleoside
  modified_base 18: mod_base = OTHER; note = 2'-fluoro modified nucleoside
  modified_base 19: mod_base = OTHER; note = 2'-O-methyl modified nucleoside with phosphorothioate linkage
  modified_base 20: mod_base = OTHER; note = 2'-O-methyl modified nucleoside with phosphorothioate linkage
  modified_base 21: mod_base = OTHER; note = 2'-O-methyl modified nucleoside
tcaatgagaagatccaatgtt

SEQ ID NO: 2366 - RNA, 21 nt, synthetic construct
  source 1..21: mol_type = other RNA
  modified_base 1: mod_base = OTHER; note = 2'-O-methyl modified nucleoside with phosphorothioate linkage
  modified_base 2: mod_base = OTHER; note = 2'-fluoro modified nucleoside with phosphorothioate linkage
  modified_base 3: mod_base = OTHER; note = 2'-O-methyl modified nucleoside
  modified_base 4: mod_base = OTHER; note = 2'-fluoro modified nucleoside
  modified_base 5: mod_base = OTHER; note = 2'-O-methyl modified nucleoside
  modified_base 6: mod_base = OTHER; note = 2'-fluoro modified nucleoside
  modified_base 7: mod_base = OTHER; note = 2'-O-methyl modified nucleoside
  modified_base 8: mod_base = OTHER; note = 2'-fluoro modified nucleoside
  modified_base 9: mod_base = OTHER; note = 2'-O-methyl modified nucleoside
  modified_base 10: mod_base = OTHER; note = 2'-fluoro modified nucleoside
  modified_base 11: mod_base = OTHER; note = 2'-O-methyl modified nucleoside
  modified_base 12: mod_base = OTHER; note = 2'-fluoro modified nucleoside
  modified_base 13: mod_base = OTHER; note = 2'-O-methyl modified nucleoside
  modified_base 14: mod_base = OTHER; note = 2'-fluoro modified nucleoside
  modified_base 15: mod_base = OTHER; note = 2'-O-methyl modified nucleoside
  modified_base 16: mod_base = OTHER; note = 2'-fluoro modified nucleoside
  modified_base 17: mod_base = OTHER; note = 2'-O-methyl modified nucleoside
  modified_base 18: mod_base = OTHER; note = 2'-fluoro modified nucleoside
  modified_base 19: mod_base = OTHER; note = 2'-O-methyl modified nucleoside with phosphorothioate linkage
  modified_base 20: mod_base = OTHER; note = 2'-O-methyl modified nucleoside with phosphorothioate linkage
  modified_base 21: mod_base = OTHER; note = 2'-O-methyl modified nucleoside
tccaatgagaagatccaattt

SEQ ID NO: 2367 - RNA, 21 nt, synthetic construct
  source 1..21: mol_type = other RNA
  modified_base 1: mod_base = OTHER; note = 2'-O-methyl modified nucleoside with phosphorothioate linkage
  modified_base 2: mod_base = OTHER; note = 2'-fluoro modified nucleoside with phosphorothioate linkage
  modified_base 3: mod_base = OTHER; note = 2'-O-methyl modified nucleoside
  modified_base 4: mod_base = OTHER; note = 2'-fluoro modified nucleoside
  modified_base 5: mod_base = OTHER; note = 2'-O-methyl modified nucleoside
  modified_base 6: mod_base = OTHER; note = 2'-fluoro modified nucleoside
  modified_base 7: mod_base = OTHER; note = 2'-O-methyl modified nucleoside
  modified_base 8: mod_base = OTHER; note = 2'-fluoro modified nucleoside
  modified_base 9: mod_base = OTHER; note = 2'-O-methyl modified nucleoside
  modified_base 10: mod_base = OTHER; note = 2'-fluoro modified nucleoside
  modified_base 11: mod_base = OTHER; note = 2'-O-methyl modified nucleoside
  modified_base 12: mod_base = OTHER; note = 2'-fluoro modified nucleoside
  modified_base 13: mod_base = OTHER; note = 2'-O-methyl modified nucleoside
  modified_base 14: mod_base = OTHER; note = 2'-fluoro modified nucleoside
  modified_base 15: mod_base = OTHER; note = 2'-O-methyl modified nucleoside
  modified_base 16: mod_base = OTHER; note = 2'-fluoro modified nucleoside
  modified_base 17: mod_base = OTHER; note = 2'-O-methyl modified nucleoside
  modified_base 18: mod_base = OTHER; note = 2'-fluoro modified nucleoside
  modified_base 19: mod_base = OTHER; note = 2'-O-methyl modified nucleoside with phosphorothioate linkage
  modified_base 20: mod_base = OTHER; note = 2'-O-methyl modified nucleoside with phosphorothioate linkage
  modified_base 21: mod_base = OTHER; note = 2'-O-methyl modified nucleoside
ttccaatgagaagatccaatt

SEQ ID NO: 2368 - RNA, 21 nt, synthetic construct
  source 1..21: mol_type = other RNA
  modified_base 1: mod_base = OTHER; note = 2'-O-methyl modified nucleoside with phosphorothioate linkage
  modified_base 2: mod_base = OTHER; note = 2'-fluoro modified nucleoside with phosphorothioate linkage
  modified_base 3: mod_base = OTHER; note = 2'-O-methyl modified nucleoside
  modified_base 4: mod_base = OTHER; note = 2'-fluoro modified nucleoside
  modified_base 5: mod_base = OTHER; note = 2'-O-methyl modified nucleoside
  modified_base 6: mod_base = OTHER; note = 2'-fluoro modified nucleoside
  modified_base 7: mod_base = OTHER; note = 2'-O-methyl modified nucleoside
  modified_base 8: mod_base = OTHER; note = 2'-fluoro modified nucleoside
  modified_base 9: mod_base = OTHER; note = 2'-O-methyl modified nucleoside
  modified_base 10: mod_base = OTHER; note = 2'-fluoro modified nucleoside
  modified_base 11: mod_base = OTHER; note = 2'-O-methyl modified nucleoside
  modified_base 12: mod_base = OTHER; note = 2'-fluoro modified nucleoside
  modified_base 13: mod_base = OTHER; note = 2'-O-methyl modified nucleoside
  modified_base 14: mod_base = OTHER; note = 2'-fluoro modified nucleoside
  modified_base 15: mod_base = OTHER; note = 2'-O-methyl modified nucleoside
  modified_base 16: mod_base = OTHER; note = 2'-fluoro modified nucleoside
  modified_base 17: mod_base = OTHER; note = 2'-O-methyl modified nucleoside
  modified_base 18: mod_base = OTHER; note = 2'-fluoro modified nucleoside
  modified_base 19: mod_base = OTHER; note = 2'-O-methyl modified nucleoside with phosphorothioate linkage
  modified_base 20: mod_base = OTHER; note = 2'-O-methyl modified nucleoside with phosphorothioate linkage
  modified_base 21: mod_base = OTHER; note = 2'-O-methyl modified nucleoside
tctccaatgagaagatccatt

SEQ ID NO: 2369 - RNA, 21 nt, synthetic construct
  source 1..21: mol_type = other RNA
  modified_base 1: mod_base = OTHER; note = 2'-O-methyl modified nucleoside with phosphorothioate linkage
  modified_base 2: mod_base = OTHER; note = 2'-fluoro modified nucleoside with phosphorothioate linkage
  modified_base 3: mod_base = OTHER; note = 2'-O-methyl modified nucleoside
  modified_base 4: mod_base = OTHER; note = 2'-fluoro modified nucleoside
  modified_base 5: mod_base = OTHER; note = 2'-O-methyl modified nucleoside
  modified_base 6: mod_base = OTHER; note = 2'-fluoro modified nucleoside
  modified_base 7: mod_base = OTHER; note = 2'-O-methyl modified nucleoside
  modified_base 8: mod_base = OTHER; note = 2'-fluoro modified nucleoside
  modified_base 9: mod_base = OTHER; note = 2'-O-methyl modified nucleoside
  modified_base 10: mod_base = OTHER; note = 2'-fluoro modified nucleoside
  modified_base 11: mod_base = OTHER; note = 2'-O-methyl modified nucleoside
  modified_base 12: mod_base = OTHER; note = 2'-fluoro modified nucleoside
  modified_base 13: mod_base = OTHER; note = 2'-O-methyl modified nucleoside
  modified_base 14: mod_base = OTHER; note = 2'-fluoro modified nucleoside
  modified_base 15: mod_base = OTHER; note = 2'-O-methyl modified nucleoside
  modified_base 16: mod_base = OTHER; note = 2'-fluoro modified nucleoside
  modified_base 17: mod_base = OTHER; note = 2'-O-methyl modified nucleoside
  modified_base 18: mod_base = OTHER; note = 2'-fluoro modified nucleoside
  modified_base 19: mod_base = OTHER; note = 2'-O-methyl modified nucleoside with phosphorothioate linkage
  modified_base 20: mod_base = OTHER; note = 2'-O-methyl modified nucleoside with phosphorothioate linkage
  modified_base 21: mod_base = OTHER; note = 2'-O-methyl modified nucleoside
tctctccaatgagaagatctt

SEQ ID NO: 2370 - RNA, 21 nt, synthetic construct
  source 1..21: mol_type = other RNA
  modified_base 1: mod_base = OTHER; note = 2'-O-methyl modified nucleoside with phosphorothioate linkage
  modified_base 2: mod_base = OTHER; note = 2'-fluoro modified nucleoside with phosphorothioate linkage
  modified_base 3: mod_base = OTHER; note = 2'-O-methyl modified nucleoside
  modified_base 4: mod_base = OTHER; note = 2'-fluoro modified nucleoside
  modified_base 5: mod_base = OTHER; note = 2'-O-methyl modified nucleoside
  modified_base 6: mod_base = OTHER; note = 2'-fluoro modified nucleoside
  modified_base 7: mod_base = OTHER; note = 2'-O-methyl modified nucleoside
  modified_base 8: mod_base = OTHER; note = 2'-fluoro modified nucleoside
  modified_base 9: mod_base = OTHER; note = 2'-O-methyl modified nucleoside
  modified_base 10: mod_base = OTHER; note = 2'-fluoro modified nucleoside
  modified_base 11: mod_base = OTHER; note = 2'-O-methyl modified nucleoside
  modified_base 12: mod_base = OTHER; note = 2'-fluoro modified nucleoside
  modified_base 13: mod_base = OTHER; note = 2'-O-methyl modified nucleoside
  modified_base 14: mod_base = OTHER; note = 2'-fluoro modified nucleoside
  modified_base 15: mod_base = OTHER; note = 2'-O-methyl modified nucleoside
  modified_base 16: mod_base = OTHER; note = 2'-fluoro modified nucleoside
  modified_base 17: mod_base = OTHER; note = 2'-O-methyl modified nucleoside
  modified_base 18: mod_base = OTHER; note = 2'-fluoro modified nucleoside
  modified_base 19: mod_base = OTHER; note = 2'-O-methyl modified nucleoside with phosphorothioate linkage
  modified_base 20: mod_base = OTHER; note = 2'-O-methyl modified nucleoside with phosphorothioate linkage
  modified_base 21: mod_base = OTHER; note = 2'-O-methyl modified nucleoside
ttatcctctccaatgagaatt

SEQ ID NO: 2371 - RNA, 21 nt, synthetic construct
  source 1..21: mol_type = other RNA
  modified_base 1: mod_base = OTHER; note = 2'-O-methyl modified nucleoside with phosphorothioate linkage
  modified_base 2: mod_base = OTHER; note = 2'-fluoro modified nucleoside with phosphorothioate linkage
  modified_base 3: mod_base = OTHER; note = 2'-O-methyl modified nucleoside
  modified_base 4: mod_base = OTHER; note = 2'-fluoro modified nucleoside
  modified_base 5: mod_base = OTHER; note = 2'-O-methyl modified nucleoside
  modified_base 6: mod_base = OTHER; note = 2'-fluoro modified nucleoside
  modified_base 7: mod_base = OTHER; note = 2'-O-methyl modified nucleoside
  modified_base 8: mod_base = OTHER; note = 2'-fluoro modified nucleoside
  modified_base 9: mod_base = OTHER; note = 2'-O-methyl modified nucleoside
  modified_base 10: mod_base = OTHER; note = 2'-fluoro modified nucleoside
  modified_base 11: mod_base = OTHER; note = 2'-O-methyl modified nucleoside
  modified_base 12: mod_base = OTHER; note = 2'-fluoro modified nucleoside
  modified_base 13: mod_base = OTHER; note = 2'-O-methyl modified nucleoside
  modified_base 14: mod_base = OTHER; note = 2'-fluoro modified nucleoside
  modified_base 15: mod_base = OTHER; note = 2'-O-methyl modified nucleoside
  modified_base 16: mod_base = OTHER; note = 2'-fluoro modified nucleoside
  modified_base 17: mod_base = OTHER; note = 2'-O-methyl modified nucleoside
  modified_base 18: mod_base = OTHER; note = 2'-fluoro modified nucleoside
  modified_base 19: mod_base = OTHER; note = 2'-O-methyl modified nucleoside with phosphorothioate linkage
  modified_base 20: mod_base = OTHER; note = 2'-O-methyl modified nucleoside with phosphorothioate linkage
  modified_base 21: mod_base = OTHER; note = 2'-O-methyl modified nucleoside
ttttatcctctccaatgagtt

SEQ ID NO: 2372 - RNA, 21 nt, synthetic construct
  source 1..21: mol_type = other RNA
  modified_base 1: mod_base = OTHER; note = 2'-O-methyl modified nucleoside with phosphorothioate linkage
  modified_base 2: mod_base = OTHER; note = 2'-fluoro modified nucleoside with phosphorothioate linkage
  modified_base 3: mod_base = OTHER; note = 2'-O-methyl modified nucleoside
  modified_base 4: mod_base = OTHER; note = 2'-fluoro modified nucleoside
  modified_base 5: mod_base = OTHER; note = 2'-O-methyl modified nucleoside
  modified_base 6: mod_base = OTHER; note = 2'-fluoro modified nucleoside
  modified_base 7: mod_base = OTHER; note = 2'-O-methyl modified nucleoside
  modified_base 8: mod_base = OTHER; note = 2'-fluoro modified nucleoside
  modified_base 9: mod_base = OTHER; note = 2'-O-methyl modified nucleoside
  modified_base 10: mod_base = OTHER; note = 2'-fluoro modified nucleoside
  modified_base 11: mod_base = OTHER; note = 2'-O-methyl modified nucleoside
  modified_base 12: mod_base = OTHER; note = 2'-fluoro modified nucleoside
  modified_base 13: mod_base = OTHER; note = 2'-O-methyl modified nucleoside
  modified_base 14: mod_base = OTHER; note = 2'-fluoro modified nucleoside
  modified_base 15: mod_base = OTHER; note = 2'-O-methyl modified nucleoside
  modified_base 16: mod_base = OTHER; note = 2'-fluoro modified nucleoside
  modified_base 17: mod_base = OTHER; note = 2'-O-methyl modified nucleoside
  modified_base 18: mod_base = OTHER; note = 2'-fluoro modified nucleoside
  modified_base 19: mod_base = OTHER; note = 2'-O-methyl modified nucleoside with phosphorothioate linkage
  modified_base 20: mod_base = OTHER; note = 2'-O-methyl modified nucleoside with phosphorothioate linkage
  modified_base 21: mod_base = OTHER; note = 2'-O-methyl modified nucleoside
tgaatccgcataactgtcttt

SEQ ID NO: 2373 - RNA, 21 nt, synthetic construct
  source 1..21: mol_type = other RNA
  modified_base 1: mod_base = OTHER; note = 2'-O-methyl modified nucleoside with phosphorothioate linkage
  modified_base 2: mod_base = OTHER; note = 2'-fluoro modified nucleoside with phosphorothioate linkage
  modified_base 3: mod_base = OTHER; note = 2'-O-methyl modified nucleoside
  modified_base 4: mod_base = OTHER; note = 2'-fluoro modified nucleoside
  modified_base 5: mod_base = OTHER; note = 2'-O-methyl modified nucleoside
  modified_base 6: mod_base = OTHER; note = 2'-fluoro modified nucleoside
  modified_base 7: mod_base = OTHER; note = 2'-O-methyl modified nucleoside
  modified_base 8: mod_base = OTHER; note = 2'-fluoro modified nucleoside
  modified_base 9: mod_base = OTHER; note = 2'-O-methyl modified nucleoside
  modified_base 10: mod_base = OTHER; note = 2'-fluoro modified nucleoside
  modified_base 11: mod_base = OTHER; note = 2'-O-methyl modified nucleoside
  modified_base 12: mod_base = OTHER; note = 2'-fluoro modified nucleoside
  modified_base 13: mod_base = OTHER; note = 2'-O-methyl modified nucleoside
  modified_base 14: mod_base = OTHER; note = 2'-fluoro modified nucleoside
  modified_base 15: mod_base = OTHER; note = 2'-O-methyl modified nucleoside
  modified_base 16: mod_base = OTHER; note = 2'-fluoro modified nucleoside
  modified_base 17: mod_base = OTHER; note = 2'-O-methyl modified nucleoside
  modified_base 18: mod_base = OTHER; note = 2'-fluoro modified nucleoside
  modified_base 19: mod_base = OTHER; note = 2'-O-methyl modified nucleoside with phosphorothioate linkage
  modified_base 20: mod_base = OTHER; note = 2'-O-methyl modified nucleoside with phosphorothioate linkage
  modified_base 21: mod_base = OTHER; note = 2'-O-methyl modified nucleoside
tagaatccgcataactgtctt

SEQ ID NO: 2374 - RNA, 21 nt, synthetic construct
  source 1..21: mol_type = other RNA
  modified_base 1: mod_base = OTHER; note = 2'-O-methyl modified nucleoside with phosphorothioate linkage
  modified_base 2: mod_base = OTHER; note = 2'-fluoro modified nucleoside with phosphorothioate linkage
  modified_base 3: mod_base = OTHER; note = 2'-O-methyl modified nucleoside
  modified_base 4: mod_base = OTHER; note = 2'-fluoro modified nucleoside
  modified_base 5: mod_base = OTHER; note = 2'-O-methyl modified nucleoside
  modified_base 6: mod_base = OTHER; note = 2'-fluoro modified nucleoside
  modified_base 7: mod_base = OTHER; note = 2'-O-methyl modified nucleoside
  modified_base 8: mod_base = OTHER; note = 2'-fluoro modified nucleoside
  modified_base 9: mod_base = OTHER; note = 2'-O-methyl modified nucleoside
  modified_base 10: mod_base = OTHER; note = 2'-fluoro modified nucleoside
  modified_base 11: mod_base = OTHER; note = 2'-O-methyl modified nucleoside
  modified_base 12: mod_base = OTHER; note = 2'-fluoro modified nucleoside
  modified_base 13: mod_base = OTHER; note = 2'-O-methyl modified nucleoside
  modified_base 14: mod_base = OTHER; note = 2'-fluoro modified nucleoside
  modified_base 15: mod_base = OTHER; note = 2'-O-methyl modified nucleoside
  modified_base 16: mod_base = OTHER; note = 2'-fluoro modified nucleoside
  modified_base 17: mod_base = OTHER; note = 2'-O-methyl modified nucleoside
  modified_base 18: mod_base = OTHER; note = 2'-fluoro modified nucleoside
  modified_base 19: mod_base = OTHER; note = 2'-O-methyl modified nucleoside with phosphorothioate linkage
  modified_base 20: mod_base = OTHER; note = 2'-O-methyl modified nucleoside with phosphorothioate linkage
  modified_base 21: mod_base = OTHER; note = 2'-O-methyl modified nucleoside
ttcaagagaatccgcataatt

SEQ ID NO: 2375 - RNA, 21 nt, synthetic construct
  source 1..21: mol_type = other RNA
  modified_base 1: mod_base = OTHER; note = 2'-O-methyl modified nucleoside with phosphorothioate linkage
  modified_base 2: mod_base = OTHER; note = 2'-fluoro modified nucleoside with phosphorothioate linkage
  modified_base 3: mod_base = OTHER; note = 2'-O-methyl modified nucleoside
  modified_base 4: mod_base = OTHER; note = 2'-fluoro modified nucleoside
  modified_base 5: mod_base = OTHER; note = 2'-O-methyl modified nucleoside
  modified_base 6: mod_base = OTHER; note = 2'-fluoro modified nucleoside
  modified_base 7: mod_base = OTHER; note = 2'-O-methyl modified nucleoside
  modified_base 8: mod_base = OTHER; note = 2'-fluoro modified nucleoside
  modified_base 9: mod_base = OTHER; note = 2'-O-methyl modified nucleoside
  modified_base 10: mod_base = OTHER; note = 2'-fluoro modified nucleoside
  modified_base 11: mod_base = OTHER; note = 2'-O-methyl modified nucleoside
  modified_base 12: mod_base = OTHER; note = 2'-fluoro modified nucleoside
  modified_base 13: mod_base = OTHER; note = 2'-O-methyl modified nucleoside
  modified_base 14: mod_base = OTHER; note = 2'-fluoro modified nucleoside
  modified_base 15: mod_base = OTHER; note = 2'-O-methyl modified nucleoside
  modified_base 16: mod_base = OTHER; note = 2'-fluoro modified nucleoside
  modified_base 17: mod_base = OTHER; note = 2'-O-methyl modified nucleoside
  modified_base 18: mod_base = OTHER; note = 2'-fluoro modified nucleoside
  modified_base 19: mod_base = OTHER; note = 2'-O-methyl modified nucleoside with phosphorothioate linkage
  modified_base 20: mod_base = OTHER; note = 2'-O-methyl modified nucleoside with phosphorothioate linkage
  modified_base 21: mod_base = OTHER; note = 2'-O-methyl modified nucleoside
tttcaagagaatccgcatatt

SEQ ID NO: 2376 - RNA, 21 nt, synthetic construct
  source 1..21: mol_type = other RNA
  modified_base 1: mod_base = OTHER; note = 2'-O-methyl modified nucleoside with phosphorothioate linkage
  modified_base 2: mod_base = OTHER; note = 2'-fluoro modified nucleoside with phosphorothioate linkage
  modified_base 3: mod_base = OTHER; note = 2'-O-methyl modified nucleoside
  modified_base 4: mod_base = OTHER; note = 2'-fluoro modified nucleoside
  modified_base 5: mod_base = OTHER; note = 2'-O-methyl modified nucleoside
  modified_base 6: mod_base = OTHER; note = 2'-fluoro modified nucleoside
  modified_base 7: mod_base = OTHER; note = 2'-O-methyl modified nucleoside
  modified_base 8: mod_base = OTHER; note = 2'-fluoro modified nucleoside
  modified_base 9: mod_base = OTHER; note = 2'-O-methyl modified nucleoside
  modified_base 10: mod_base = OTHER; note = 2'-fluoro modified nucleoside
  modified_base 11: mod_base = OTHER; note = 2'-O-methyl modified nucleoside
  modified_base 12: mod_base = OTHER; note = 2'-fluoro modified nucleoside
  modified_base 13: mod_base = OTHER; note = 2'-O-methyl modified nucleoside
  modified_base 14: mod_base = OTHER; note = 2'-fluoro modified nucleoside
  modified_base 15: mod_base = OTHER; note = 2'-O-methyl modified nucleoside
  modified_base 16: mod_base = OTHER; note = 2'-fluoro modified nucleoside
  modified_base 17: mod_base = OTHER; note = 2'-O-methyl modified nucleoside
  modified_base 18: mod_base = OTHER; note = 2'-fluoro modified nucleoside
  modified_base 19: mod_base = OTHER; note = 2'-O-methyl modified nucleoside with phosphorothioate linkage
  modified_base 20: mod_base = OTHER; note = 2'-O-methyl modified nucleoside with phosphorothioate linkage
  modified_base 21: mod_base = OTHER; note = 2'-O-methyl modified nucleoside
ttttcaagagaatccgcattt

SEQ ID NO: 2377 - RNA, 21 nt, synthetic construct
  source 1..21: mol_type = other RNA
  modified_base 1: mod_base = OTHER; note = 2'-O-methyl modified nucleoside with phosphorothioate linkage
  modified_base 2: mod_base = OTHER; note = 2'-fluoro modified nucleoside with phosphorothioate linkage
  modified_base 3: mod_base = OTHER; note = 2'-O-methyl modified nucleoside
  modified_base 4: mod_base = OTHER; note = 2'-fluoro modified nucleoside
  modified_base 5: mod_base = OTHER; note = 2'-O-methyl modified nucleoside
  modified_base 6: mod_base = OTHER; note = 2'-fluoro modified nucleoside
  modified_base 7: mod_base = OTHER; note = 2'-O-methyl modified nucleoside
  modified_base 8: mod_base = OTHER; note = 2'-fluoro modified nucleoside
  modified_base 9: mod_base = OTHER; note = 2'-O-methyl modified nucleoside
  modified_base 10: mod_base = OTHER; note = 2'-fluoro modified nucleoside
  modified_base 11: mod_base = OTHER; note = 2'-O-methyl modified nucleoside
  modified_base 12: mod_base = OTHER; note = 2'-fluoro modified nucleoside
  modified_base 13: mod_base = OTHER; note = 2'-O-methyl modified nucleoside
  modified_base 14: mod_base = OTHER; note = 2'-fluoro modified nucleoside
  modified_base 15: mod_base = OTHER; note = 2'-O-methyl modified nucleoside
  modified_base 16: mod_base = OTHER; note = 2'-fluoro modified nucleoside
  modified_base 17: mod_base = OTHER; note = 2'-O-methyl modified nucleoside
  modified_base 18: mod_base = OTHER; note = 2'-fluoro modified nucleoside
  modified_base 19: mod_base = OTHER; note = 2'-O-methyl modified nucleoside with phosphorothioate linkage
  modified_base 20: mod_base = OTHER; note = 2'-O-methyl modified nucleoside with phosphorothioate linkage
  modified_base 21: mod_base = OTHER; note = 2'-O-methyl modified nucleoside
tccgtaacaccactctgtatt

SEQ ID NO: 2378 - RNA, 21 nt, synthetic construct
  source 1..21: mol_type = other RNA
  modified_base 1: mod_base = OTHER; note = 2'-O-methyl modified nucleoside with phosphorothioate linkage
  modified_base 2: mod_base = OTHER; note = 2'-fluoro modified nucleoside with phosphorothioate linkage
  modified_base 3: mod_base = OTHER; note = 2'-O-methyl modified nucleoside
  modified_base 4: mod_base = OTHER; note = 2'-fluoro modified nucleoside
  modified_base 5: mod_base = OTHER; note = 2'-O-methyl modified nucleoside
  modified_base 6: mod_base = OTHER; note = 2'-fluoro modified nucleoside
  modified_base 7: mod_base = OTHER; note = 2'-O-methyl modified nucleoside
  modified_base 8: mod_base = OTHER; note = 2'-fluoro modified nucleoside
  modified_base 9: mod_base = OTHER; note = 2'-O-methyl modified nucleoside
  modified_base 10: mod_base = OTHER; note = 2'-fluoro modified nucleoside
  modified_base 11: mod_base = OTHER; note = 2'-O-methyl modified nucleoside
  modified_base 12: mod_base = OTHER; note = 2'-fluoro modified nucleoside
  modified_base 13: mod_base = OTHER; note = 2'-O-methyl modified nucleoside
  modified_base 14: mod_base = OTHER; note = 2'-fluoro modified nucleoside
  modified_base 15: mod_base = OTHER; note = 2'-O-methyl modified nucleoside
  modified_base 16: mod_base = OTHER; note = 2'-fluoro modified nucleoside
  modified_base 17: mod_base = OTHER; note = 2'-O-methyl modified nucleoside
  modified_base 18: mod_base = OTHER; note = 2'-fluoro modified nucleoside
  modified_base 19: mod_base = OTHER; note = 2'-O-methyl modified nucleoside with phosphorothioate linkage
  modified_base 20: mod_base = OTHER; note = 2'-O-methyl modified nucleoside with phosphorothioate linkage
  modified_base 21: mod_base = OTHER; note = 2'-O-methyl modified nucleoside
ttttccaccgccgtaacactt

SEQ ID NO: 2379 - RNA, 21 nt, synthetic construct
  source 1..21: mol_type = other RNA
  modified_base 1: mod_base = OTHER; note = 2'-O-methyl modified nucleoside with phosphorothioate linkage
  modified_base 2: mod_base = OTHER; note = 2'-fluoro modified nucleoside with phosphorothioate linkage
  modified_base 3: mod_base = OTHER; note = 2'-O-methyl modified nucleoside
  modified_base 4: mod_base = OTHER; note = 2'-fluoro modified nucleoside
  modified_base 5: mod_base = OTHER; note = 2'-O-methyl modified nucleoside
  modified_base 6: mod_base = OTHER; note = 2'-fluoro modified nucleoside
  modified_base 7: mod_base = OTHER; note = 2'-O-methyl modified nucleoside
  modified_base 8: mod_base = OTHER; note = 2'-fluoro modified nucleoside
  modified_base 9: mod_base = OTHER; note = 2'-O-methyl modified nucleoside
  modified_base 10: mod_base = OTHER; note = 2'-fluoro modified nucleoside
  modified_base 11: mod_base = OTHER; note = 2'-O-methyl modified nucleoside
  modified_base 12: mod_base = OTHER; note = 2'-fluoro modified nucleoside
  modified_base 13: mod_base = OTHER; note = 2'-O-methyl modified nucleoside
  modified_base 14: mod_base = OTHER; note = 2'-fluoro modified nucleoside
  modified_base 15: mod_base = OTHER; note = 2'-O-methyl modified nucleoside
  modified_base 16: mod_base = OTHER; note = 2'-fluoro modified nucleoside
  modified_base 17: mod_base = OTHER; note = 2'-O-methyl modified nucleoside
  modified_base 18: mod_base = OTHER; note = 2'-fluoro modified nucleoside
  modified_base 19: mod_base = OTHER; note = 2'-O-methyl modified nucleoside with phosphorothioate linkage
  modified_base 20: mod_base = OTHER; note = 2'-O-methyl modified nucleoside with phosphorothioate linkage
  modified_base 21: mod_base = OTHER; note = 2'-O-methyl modified nucleoside
tttttccaccgccgtaacatt

SEQ ID NO: 2380 - RNA, 21 nt, synthetic construct
  source 1..21: mol_type = other RNA
  modified_base 1: mod_base = OTHER; note = 2'-O-methyl modified nucleoside with phosphorothioate linkage
  modified_base 2: mod_base = OTHER; note = 2'-fluoro modified nucleoside with phosphorothioate linkage
  modified_base 3: mod_base = OTHER; note = 2'-O-methyl modified nucleoside
  modified_base 4: mod_base = OTHER; note = 2'-fluoro modified nucleoside
  modified_base 5: mod_base = OTHER; note = 2'-O-methyl modified nucleoside
  modified_base 6: mod_base = OTHER; note = 2'-fluoro modified nucleoside
  modified_base 7: mod_base = OTHER; note = 2'-O-methyl modified nucleoside
  modified_base 8: mod_base = OTHER; note = 2'-fluoro modified nucleoside
  modified_base 9: mod_base = OTHER; note = 2'-O-methyl modified nucleoside
  modified_base 10: mod_base = OTHER; note = 2'-fluoro modified nucleoside
  modified_base 11: mod_base = OTHER; note = 2'-O-methyl modified nucleoside
  modified_base 12: mod_base = OTHER; note = 2'-fluoro modified nucleoside
  modified_base 13: mod_base = OTHER; note = 2'-O-methyl modified nucleoside
  modified_base 14: mod_base = OTHER; note = 2'-fluoro modified nucleoside
  modified_base 15: mod_base = OTHER; note = 2'-O-methyl modified nucleoside
  modified_base 16: mod_base = OTHER; note = 2'-fluoro modified nucleoside
  modified_base 17: mod_base = OTHER; note = 2'-O-methyl modified nucleoside
  modified_base 18: mod_base = OTHER; note = 2'-fluoro modified nucleoside
  modified_base 19: mod_base = OTHER; note = 2'-O-methyl modified nucleoside with phosphorothioate linkage
  modified_base 20: mod_base = OTHER; note = 2'-O-methyl modified nucleoside with phosphorothioate linkage
  modified_base 21: mod_base = OTHER; note = 2'-O-methyl modified nucleoside
tcttttccaccgccgtaactt

SEQ ID NO: 2381 - RNA, 21 nt, synthetic construct
  source 1..21: mol_type = other RNA
  modified_base 1: mod_base = OTHER; note = 2'-O-methyl modified nucleoside with phosphorothioate linkage
  modified_base 2: mod_base = OTHER; note = 2'-fluoro modified nucleoside with phosphorothioate linkage
  modified_base 3: mod_base = OTHER; note = 2'-O-methyl modified nucleoside
  modified_base 4: mod_base = OTHER; note = 2'-fluoro modified nucleoside
  modified_base 5: mod_base = OTHER; note = 2'-O-methyl modified nucleoside
  modified_base 6: mod_base = OTHER; note = 2'-fluoro modified nucleoside
  modified_base 7: mod_base = OTHER; note = 2'-O-methyl modified nucleoside
  modified_base 8: mod_base = OTHER; note = 2'-fluoro modified nucleoside
  modified_base 9: mod_base = OTHER; note = 2'-O-methyl modified nucleoside
  modified_base 10: mod_base = OTHER; note = 2'-fluoro modified nucleoside
  modified_base 11: mod_base = OTHER; note = 2'-O-methyl modified nucleoside
  modified_base 12: mod_base = OTHER; note = 2'-fluoro modified nucleoside
  modified_base 13: mod_base = OTHER; note = 2'-O-methyl modified nucleoside
  modified_base 14: mod_base = OTHER; note = 2'-fluoro modified nucleoside
  modified_base 15: mod_base = OTHER; note = 2'-O-methyl modified nucleoside
  modified_base 16: mod_base = OTHER; note = 2'-fluoro modified nucleoside
  modified_base 17: mod_base = OTHER; note = 2'-O-methyl modified nucleoside
  modified_base 18: mod_base = OTHER; note = 2'-fluoro modified nucleoside
  modified_base 19: mod_base = OTHER; note = 2'-O-methyl modified nucleoside with phosphorothioate linkage
  modified_base 20: mod_base = OTHER; note = 2'-O-methyl modified nucleoside with phosphorothioate linkage
  modified_base 21: mod_base = OTHER; note = 2'-O-methyl modified nucleoside
tacttttccaccgccgtaatt

SEQ ID NO: 2382 - RNA, 21 nt, synthetic construct
  source 1..21: mol_type = other RNA
  modified_base 1: mod_base = OTHER; note = 2'-O-methyl modified nucleoside with phosphorothioate linkage
  modified_base 2: mod_base = OTHER; note = 2'-fluoro modified nucleoside with phosphorothioate linkage
  modified_base 3: mod_base = OTHER; note = 2'-O-methyl modified nucleoside
  modified_base 4: mod_base = OTHER; note = 2'-fluoro modified nucleoside
  modified_base 5: mod_base = OTHER; note = 2'-O-methyl modified nucleoside
  modified_base 6: mod_base = OTHER; note = 2'-fluoro modified nucleoside
  modified_base 7: mod_base = OTHER; note = 2'-O-methyl modified nucleoside
  modified_base 8: mod_base = OTHER; note = 2'-fluoro modified nucleoside
  modified_base 9: mod_base = OTHER; note = 2'-O-methyl modified nucleoside
  modified_base 10: mod_base = OTHER; note = 2'-fluoro modified nucleoside
  modified_base 11: mod_base = OTHER; note = 2'-O-methyl modified nucleoside
  modified_base 12: mod_base = OTHER; note = 2'-fluoro modified nucleoside
  modified_base 13: mod_base = OTHER; note = 2'-O-methyl modified nucleoside
  modified_base 14: mod_base = OTHER; note = 2'-fluoro modified nucleoside
  modified_base 15: mod_base = OTHER; note = 2'-O-methyl modified nucleoside
  modified_base 16: mod_base = OTHER; note = 2'-fluoro modified nucleoside
  modified_base 17: mod_base = OTHER; note = 2'-O-methyl modified nucleoside
  modified_base 18: mod_base = OTHER; note = 2'-fluoro modified nucleoside
  modified_base 19: mod_base = OTHER; note = 2'-O-methyl modified nucleoside with phosphorothioate linkage
  modified_base 20: mod_base = OTHER; note = 2'-O-methyl modified nucleoside with phosphorothioate linkage
  modified_base 21: mod_base = OTHER; note = 2'-O-methyl modified nucleoside
taacttttccaccgccgtatt

SEQ ID NO: 2383 - RNA, 21 nt, synthetic construct
  source 1..21: mol_type = other RNA
  modified_base 1: mod_base = OTHER; note = 2'-O-methyl modified nucleoside with phosphorothioate linkage
  modified_base 2: mod_base = OTHER; note = 2'-fluoro modified nucleoside with phosphorothioate linkage
  modified_base 3: mod_base = OTHER; note = 2'-O-methyl modified nucleoside
  modified_base 4: mod_base = OTHER; note = 2'-fluoro modified nucleoside
  modified_base 5: mod_base = OTHER; note = 2'-O-methyl modified nucleoside
  modified_base 6: mod_base = OTHER; note = 2'-fluoro modified nucleoside
  modified_base 7: mod_base = OTHER; note = 2'-O-methyl modified nucleoside
  modified_base 8: mod_base = OTHER; note = 2'-fluoro modified nucleoside
  modified_base 9: mod_base = OTHER; note = 2'-O-methyl modified nucleoside
  modified_base 10: mod_base = OTHER; note = 2'-fluoro modified nucleoside
  modified_base 11: mod_base = OTHER; note = 2'-O-methyl modified nucleoside
  modified_base 12: mod_base = OTHER; note = 2'-fluoro modified nucleoside
  modified_base 13: mod_base = OTHER; note = 2'-O-methyl modified nucleoside
  modified_base 14: mod_base = OTHER; note = 2'-fluoro modified nucleoside
  modified_base 15: mod_base = OTHER; note = 2'-O-methyl modified nucleoside
  modified_base 16: mod_base = OTHER; note = 2'-fluoro modified nucleoside
  modified_base 17: mod_base = OTHER; note = 2'-O-methyl modified nucleoside
  modified_base 18: mod_base = OTHER; note = 2'-fluoro modified nucleoside
  modified_base 19: mod_base = OTHER; note = 2'-O-methyl modified nucleoside with phosphorothioate linkage
  modified_base 20: mod_base = OTHER; note = 2'-O-methyl modified nucleoside with phosphorothioate linkage
  modified_base 21: mod_base = OTHER; note = 2'-O-methyl modified nucleoside
ttaaacttttccaccgccgtt

SEQ ID NO: 2384 - RNA, 21 nt, synthetic construct
  source 1..21: mol_type = other RNA
  modified_base 1: mod_base = OTHER; note = 2'-O-methyl modified nucleoside with phosphorothioate linkage
  modified_base 2: mod_base = OTHER; note = 2'-fluoro modified nucleoside with phosphorothioate linkage
  modified_base 3: mod_base = OTHER; note = 2'-O-methyl modified nucleoside
  modified_base 4: mod_base = OTHER; note = 2'-fluoro modified nucleoside
  modified_base 5: mod_base = OTHER; note = 2'-O-methyl modified nucleoside
  modified_base 6: mod_base = OTHER; note = 2'-fluoro modified nucleoside
  modified_base 7: mod_base = OTHER; note = 2'-O-methyl modified nucleoside
  modified_base 8: mod_base = OTHER; note = 2'-fluoro modified nucleoside
  modified_base 9: mod_base = OTHER; note = 2'-O-methyl modified nucleoside
  modified_base 10: mod_base = OTHER; note = 2'-fluoro modified nucleoside
  modified_base 11: mod_base = OTHER; note = 2'-O-methyl modified nucleoside
  modified_base 12: mod_base = OTHER; note = 2'-fluoro modified nucleoside
  modified_base 13: mod_base = OTHER; note = 2'-O-methyl modified nucleoside
  modified_base 14: mod_base = OTHER; note = 2'-fluoro modified nucleoside
  modified_base 15: mod_base = OTHER; note = 2'-O-methyl modified nucleoside
  modified_base 16: mod_base = OTHER; note = 2'-fluoro modified nucleoside
  modified_base 17: mod_base = OTHER; note = 2'-O-methyl modified nucleoside
  modified_base 18: mod_base = OTHER; note = 2'-fluoro modified nucleoside
  modified_base 19: mod_base = OTHER; note = 2'-O-methyl modified nucleoside with phosphorothioate linkage
  modified_base 20: mod_base = OTHER; note = 2'-O-methyl modified nucleoside with phosphorothioate linkage
  modified_base 21: mod_base = OTHER; note = 2'-O-methyl modified nucleoside
tcttaggcaactttaaacttt

SEQ ID NO: 2385 - RNA, 21 nt, synthetic construct
  source 1..21: mol_type = other RNA
  modified_base 1: mod_base = OTHER; note = 2'-O-methyl modified nucleoside with phosphorothioate linkage
  modified_base 2: mod_base = OTHER; note = 2'-fluoro modified nucleoside with phosphorothioate linkage
  modified_base 3: mod_base = OTHER; note = 2'-O-methyl modified nucleoside
  modified_base 4: mod_base = OTHER; note = 2'-fluoro modified nucleoside
  modified_base 5: mod_base = OTHER; note = 2'-O-methyl modified nucleoside
  modified_base 6: mod_base = OTHER; note = 2'-fluoro modified nucleoside
  modified_base 7: mod_base = OTHER; note = 2'-O-methyl modified nucleoside
  modified_base 8: mod_base = OTHER; note = 2'-fluoro modified nucleoside
  modified_base 9: mod_base = OTHER; note = 2'-O-methyl modified nucleoside
  modified_base 10: mod_base = OTHER; note = 2'-fluoro modified nucleoside
  modified_base 11: mod_base = OTHER; note = 2'-O-methyl modified nucleoside
  modified_base 12: mod_base = OTHER; note = 2'-fluoro modified nucleoside
  modified_base 13: mod_base = OTHER; note = 2'-O-methyl modified nucleoside
  modified_base 14: mod_base = OTHER; note = 2'-fluoro modified nucleoside
  modified_base 15: mod_base = OTHER; note = 2'-O-methyl modified nucleoside
  modified_base 16: mod_base = OTHER; note = 2'-fluoro modified nucleoside
  modified_base 17: mod_base = OTHER; note = 2'-O-methyl modified nucleoside
  modified_base 18: mod_base = OTHER; note = 2'-fluoro modified nucleoside
  modified_base 19: mod_base = OTHER; note = 2'-O-methyl modified nucleoside with phosphorothioate linkage
  modified_base 20: mod_base = OTHER; note = 2'-O-methyl modified nucleoside with phosphorothioate linkage
  modified_base 21: mod_base = OTHER; note = 2'-O-methyl modified nucleoside
tttcttaggcaactttaaatt

SEQ ID NO: 2386 - RNA, 21 nt, synthetic construct
  source 1..21: mol_type = other RNA
  modified_base 1: mod_base = OTHER; note = 2'-O-methyl modified nucleoside with phosphorothioate linkage
  modified_base 2: mod_base = OTHER; note = 2'-fluoro modified nucleoside with phosphorothioate linkage
  modified_base 3: mod_base = OTHER; note = 2'-O-methyl modified nucleoside
  modified_base 4: mod_base = OTHER; note = 2'-fluoro modified nucleoside
  modified_base 5: mod_base = OTHER; note = 2'-O-methyl modified nucleoside
  modified_base 6: mod_base = OTHER; note = 2'-fluoro modified nucleoside
  modified_base 7: mod_base = OTHER; note = 2'-O-methyl modified nucleoside
  modified_base 8: mod_base = OTHER; note = 2'-fluoro modified nucleoside
  modified_base 9: mod_base = OTHER; note = 2'-O-methyl modified nucleoside
  modified_base 10: mod_base = OTHER; note = 2'-fluoro modified nucleoside
  modified_base 11: mod_base = OTHER; note = 2'-O-methyl modified nucleoside
  modified_base 12: mod_base = OTHER; note = 2'-fluoro modified nucleoside
  modified_base 13: mod_base = OTHER; note = 2'-O-methyl modified nucleoside
  modified_base 14: mod_base = OTHER; note = 2'-fluoro modified nucleoside
  modified_base 15: mod_base = OTHER; note = 2'-O-methyl modified nucleoside
  modified_base 16: mod_base = OTHER; note = 2'-fluoro modified nucleoside
  modified_base 17: mod_base = OTHER; note = 2'-O-methyl modified nucleoside
  modified_base 18: mod_base = OTHER; note = 2'-fluoro modified nucleoside
  modified_base 19: mod_base = OTHER; note = 2'-O-methyl modified nucleoside with phosphorothioate linkage
  modified_base 20: mod_base = OTHER; note = 2'-O-methyl modified nucleoside with phosphorothioate linkage
  modified_base 21: mod_base = OTHER; note = 2'-O-methyl modified nucleoside
tttgctaaaaagcaatccatt

SEQ ID NO: 2387 - RNA, 21 nt, synthetic construct
  source 1..21: mol_type = other RNA
  modified_base 1: mod_base = OTHER; note = 2'-O-methyl modified nucleoside with phosphorothioate linkage
  modified_base 2: mod_base = OTHER; note = 2'-fluoro modified nucleoside with phosphorothioate linkage
  modified_base 3: mod_base = OTHER; note = 2'-O-methyl modified nucleoside
  modified_base 4: mod_base = OTHER; note = 2'-fluoro modified nucleoside
  modified_base 5: mod_base = OTHER; note = 2'-O-methyl modified nucleoside
  modified_base 6: mod_base = OTHER; note = 2'-fluoro modified nucleoside
  modified_base 7: mod_base = OTHER; note = 2'-O-methyl modified nucleoside
  modified_base 8: mod_base = OTHER; note = 2'-fluoro modified nucleoside
  modified_base 9: mod_base = OTHER; note = 2'-O-methyl modified nucleoside
  modified_base 10: mod_base = OTHER; note = 2'-fluoro modified nucleoside
  modified_base 11: mod_base = OTHER; note = 2'-O-methyl modified nucleoside
  modified_base 12: mod_base = OTHER; note = 2'-fluoro modified nucleoside
  modified_base 13: mod_base = OTHER; note = 2'-O-methyl modified nucleoside
  modified_base 14: mod_base = OTHER; note = 2'-fluoro modified nucleoside
  modified_base 15: mod_base = OTHER; note = 2'-O-methyl modified nucleoside
  modified_base 16: mod_base = OTHER; note = 2'-fluoro modified nucleoside
  modified_base 17: mod_base = OTHER; note = 2'-O-methyl modified nucleoside
  modified_base 18: mod_base = OTHER; note = 2'-fluoro modified nucleoside
  modified_base 19: mod_base = OTHER; note = 2'-O-methyl modified nucleoside with phosphorothioate linkage
  modified_base 20: mod_base = OTHER; note = 2'-O-methyl modified nucleoside with phosphorothioate linkage
  modified_base 21: mod_base = OTHER; note = 2'-O-methyl modified nucleoside
tttttcaggtgaccccttctt

SEQ ID NO: 2388 - RNA, 21 nt, synthetic construct
  source 1..21: mol_type = other RNA
  modified_base 1: mod_base = OTHER; note = 2'-O-methyl modified nucleoside with phosphorothioate linkage
  modified_base 2: mod_base = OTHER; note = 2'-fluoro modified nucleoside with phosphorothioate linkage
  modified_base 3: mod_base = OTHER; note = 2'-O-methyl modified nucleoside
  modified_base 4: mod_base = OTHER; note = 2'-fluoro modified nucleoside
  modified_base 5: mod_base = OTHER; note = 2'-O-methyl modified nucleoside
  modified_base 6: mod_base = OTHER; note = 2'-fluoro modified nucleoside
  modified_base 7: mod_base = OTHER; note = 2'-O-methyl modified nucleoside
  modified_base 8: mod_base = OTHER; note = 2'-fluoro modified nucleoside
  modified_base 9: mod_base = OTHER; note = 2'-O-methyl modified nucleoside
  modified_base 10: mod_base = OTHER; note = 2'-fluoro modified nucleoside
  modified_base 11: mod_base = OTHER; note = 2'-O-methyl modified nucleoside
  modified_base 12: mod_base = OTHER; note = 2'-fluoro modified nucleoside
  modified_base 13: mod_base = OTHER; note = 2'-O-methyl modified nucleoside
  modified_base 14: mod_base = OTHER; note = 2'-fluoro modified nucleoside
  modified_base 15: mod_base = OTHER; note = 2'-O-methyl modified nucleoside
  modified_base 16: mod_base = OTHER; note = 2'-fluoro modified nucleoside
  modified_base 17: mod_base = OTHER; note = 2'-O-methyl modified nucleoside
  modified_base 18: mod_base = OTHER; note = 2'-fluoro modified nucleoside
  modified_base 19: mod_base = OTHER; note = 2'-O-methyl modified nucleoside with phosphorothioate linkage
  modified_base 20: mod_base = OTHER; note = 2'-O-methyl modified nucleoside with phosphorothioate linkage
  modified_base 21: mod_base = OTHER; note = 2'-O-methyl modified nucleoside
tgctaagagaactttattttt

SEQ ID NO: 2389 - RNA, 21 nt, synthetic construct
  source 1..21: mol_type = other RNA
  modified_base 1: mod_base = OTHER; note = 2'-O-methyl modified nucleoside with phosphorothioate linkage
  modified_base 2: mod_base = OTHER; note = 2'-O-methyl modified nucleoside with phosphorothioate linkage
  modified_base 3: mod_base = OTHER; note = 2'-O-methyl modified nucleoside
  modified_base 4: mod_base = OTHER; note = 2'-O-methyl modified nucleoside
  modified_base 5: mod_base = OTHER; note = 2'-O-methyl modified nucleoside
  modified_base 6: mod_base = OTHER; note = 2'-fluoro modified nucleoside
  modified_base 7: mod_base = OTHER; note = 2'-O-methyl modified nucleoside
  modified_base 8: mod_base = OTHER; note = 2'-fluoro modified nucleoside
  modified_base 9: mod_base = OTHER; note = 2'-fluoro modified nucleoside
  modified_base 10: mod_base = OTHER; note = 2'-O-methyl modified nucleoside
  modified_base 11: mod_base = OTHER; note = 2'-O-methyl modified nucleoside
  modified_base 12: mod_base = OTHER; note = 2'-O-methyl modified nucleoside
  modified_base 13: mod_base = OTHER; note = 2'-O-methyl modified nucleoside
  modified_base 14: mod_base = OTHER; note = 2'-O-methyl modified nucleoside
  modified_base 15: mod_base = OTHER; note = 2'-O-methyl modified nucleoside
  modified_base 16: mod_base = OTHER; note = 2'-O-methyl modified nucleoside
  modified_base 17: mod_base = OTHER; note = 2'-O-methyl modified nucleoside
  modified_base 18: mod_base = OTHER; note = 2'-O-methyl modified nucleoside
  modified_base 19: mod_base = OTHER; note = 2'-O-methyl modified nucleoside with phosphorothioate linkage
  modified_base 20: mod_base = OTHER; note = 2'-O-methyl modified nucleoside with phosphorothioate linkage
  modified_base 21: mod_base = OTHER; note = 2'-O-methyl modified nucleoside
tggctatggctagtgttaatt

SEQ ID NO: 2390 - RNA, 21 nt, synthetic construct
  source 1..21: mol_type = other RNA
  modified_base 1: mod_base = OTHER; note = 2'-O-methyl modified nucleoside with phosphorothioate linkage
  modified_base 2: mod_base = OTHER; note = 2'-O-methyl modified nucleoside with phosphorothioate linkage
  modified_base 3: mod_base = OTHER; note = 2'-O-methyl modified nucleoside
  modified_base 4: mod_base = OTHER; note = 2'-O-methyl modified nucleoside
  modified_base 5: mod_base = OTHER; note = 2'-O-methyl modified nucleoside
  modified_base 6: mod_base = OTHER; note = 2'-fluoro modified nucleoside
  modified_base 7: mod_base = OTHER; note = 2'-O-methyl modified nucleoside
  modified_base 8: mod_base = OTHER; note = 2'-fluoro modified nucleoside
  modified_base 9: mod_base = OTHER; note = 2'-fluoro modified nucleoside
  modified_base 10: mod_base = OTHER; note = 2'-O-methyl modified nucleoside
  modified_base 11: mod_base = OTHER; note = 2'-O-methyl modified nucleoside
  modified_base 12: mod_base = OTHER; note = 2'-O-methyl modified nucleoside
  modified_base 13: mod_base = OTHER; note = 2'-O-methyl modified nucleoside
  modified_base 14: mod_base = OTHER; note = 2'-O-methyl modified nucleoside
  modified_base 15: mod_base = OTHER; note = 2'-O-methyl modified nucleoside
  modified_base 16: mod_base = OTHER; note = 2'-O-methyl modified nucleoside
  modified_base 17: mod_base = OTHER; note = 2'-O-methyl modified nucleoside
  modified_base 18: mod_base = OTHER; note = 2'-O-methyl modified nucleoside
  modified_base 19: mod_base = OTHER; note = 2'-O-methyl modified nucleoside with phosphorothioate linkage
  modified_base 20: mod_base = OTHER; note = 2'-O-methyl modified nucleoside with phosphorothioate linkage
  modified_base 21: mod_base = OTHER; note = 2'-O-methyl modified nucleoside
atcatacaaactctgtacatt

SEQ ID NO: 2391 - RNA, 21 nt, synthetic construct
  source 1..21: mol_type = other RNA
  modified_base 1: mod_base = OTHER; note = 2'-O-methyl modified nucleoside with phosphorothioate linkage
  modified_base 2: mod_base = OTHER; note = 2'-O-methyl modified nucleoside with phosphorothioate linkage
  modified_base 3: mod_base = OTHER; note = 2'-O-methyl modified nucleoside
  modified_base 4: mod_base = OTHER; note = 2'-O-methyl modified nucleoside
  modified_base 5: mod_base = OTHER; note = 2'-O-methyl modified nucleoside
  modified_base 6: mod_base = OTHER; note = 2'-fluoro modified nucleoside
  modified_base 7: mod_base = OTHER; note = 2'-O-methyl modified nucleoside
  modified_base 8: mod_base = OTHER; note = 2'-O-methyl modified nucleoside
  modified_base 9: mod_base = OTHER; note = 2'-fluoro modified nucleoside
  modified_base 10: mod_base = OTHER; note = 2'-fluoro modified nucleoside
  modified_base 11: mod_base = OTHER; note = 2'-O-methyl modified nucleoside
  modified_base 12: mod_base = OTHER; note = 2'-O-methyl modified nucleoside
  modified_base 13: mod_base = OTHER; note = 2'-O-methyl modified nucleoside
  modified_base 14: mod_base = OTHER; note = 2'-O-methyl modified nucleoside
  modified_base 15: mod_base = OTHER; note = 2'-O-methyl modified nucleoside
  modified_base 16: mod_base = OTHER; note = 2'-O-methyl modified nucleoside
  modified_base 17: mod_base = OTHER; note = 2'-O-methyl modified nucleoside
  modified_base 18: mod_base = OTHER; note = 2'-O-methyl modified nucleoside
  modified_base 19: mod_base = OTHER; note = 2'-O-methyl modified nucleoside with phosphorothioate linkage
  modified_base 20: mod_base = OTHER; note = 2'-O-methyl modified nucleoside with phosphorothioate linkage
  modified_base 21: mod_base = OTHER; note = 2'-O-methyl modified nucleoside
ctgtacttcctggaatcgatt

SEQ ID NO: 2392 - RNA, 21 nt, synthetic construct
  source 1..21: mol_type = other RNA
  modified_base 1: mod_base = OTHER; note = 2'-O-methyl modified nucleoside with phosphorothioate linkage
  modified_base 2: mod_base = OTHER; note = 2'-O-methyl modified nucleoside with phosphorothioate linkage
  modified_base 3: mod_base = OTHER; note = 2'-O-methyl modified nucleoside
  modified_base 4: mod_base = OTHER; note = 2'-O-methyl modified nucleoside
  modified_base 5: mod_base = OTHER; note = 2'-fluoro modified nucleoside
  modified_base 6: mod_base = OTHER; note = 2'-O-methyl modified nucleoside
  modified_base 7: mod_base = OTHER; note = 2'-O-methyl modified nucleoside
  modified_base 8: mod_base = OTHER; note = 2'-fluoro modified nucleoside
  modified_base 9: mod_base = OTHER; note = 2'-fluoro modified nucleoside
  modified_base 10: mod_base = OTHER; note = 2'-O-methyl modified nucleoside
  modified_base 11: mod_base = OTHER; note = 2'-O-methyl modified nucleoside
  modified_base 12: mod_base = OTHER; note = 2'-O-methyl modified nucleoside
  modified_base 13: mod_base = OTHER; note = 2'-O-methyl modified nucleoside
  modified_base 14: mod_base = OTHER; note = 2'-O-methyl modified nucleoside
  modified_base 15: mod_base = OTHER; note = 2'-O-methyl modified nucleoside
  modified_base 16: mod_base = OTHER; note = 2'-O-methyl modified nucleoside
  modified_base 17: mod_base = OTHER; note = 2'-O-methyl modified nucleoside
  modified_base 18: mod_base = OTHER; note = 2'-O-methyl modified nucleoside
  modified_base 19: mod_base = OTHER; note = 2'-O-methyl modified nucleoside with phosphorothioate linkage
  modified_base 20: mod_base = OTHER; note = 2'-O-methyl modified nucleoside with phosphorothioate linkage
  modified_base 21: mod_base = OTHER; note = 2'-O-methyl modified nucleoside
tgtacttcctggaatcgaatt

SEQ ID NO: 2393 - RNA, 21 nt, synthetic construct
  source 1..21: mol_type = other RNA
  modified_base 1: mod_base = OTHER; note = 2'-O-methyl modified nucleoside with phosphorothioate linkage
  modified_base 2: mod_base = OTHER; note = 2'-O-methyl modified nucleoside with phosphorothioate linkage
  modified_base 3: mod_base = OTHER; note = 2'-O-methyl modified nucleoside
  modified_base 4: mod_base = OTHER; note = 2'-O-methyl modified nucleoside
  modified_base 5: mod_base = OTHER; note = 2'-fluoro modified nucleoside
  modified_base 6: mod_base = OTHER; note = 2'-fluoro modified nucleoside
  modified_base 7: mod_base = OTHER; note = 2'-O-methyl modified nucleoside
  modified_base 8: mod_base = OTHER; note = 2'-O-methyl modified nucleoside
  modified_base 9: mod_base = OTHER; note = 2'-fluoro modified nucleoside
  modified_base 10: mod_base = OTHER; note = 2'-O-methyl modified nucleoside
  modified_base 11: mod_base = OTHER; note = 2'-O-methyl modified nucleoside
  modified_base 12: mod_base = OTHER; note = 2'-O-methyl modified nucleoside
  modified_base 13: mod_base = OTHER; note = 2'-O-methyl modified nucleoside
  modified_base 14: mod_base = OTHER; note = 2'-O-methyl modified nucleoside
  modified_base 15: mod_base = OTHER; note = 2'-O-methyl modified nucleoside
  modified_base 16: mod_base = OTHER; note = 2'-O-methyl modified nucleoside
  modified_base 17: mod_base = OTHER; note = 2'-O-methyl modified nucleoside
  modified_base 18: mod_base = OTHER; note = 2'-O-methyl modified nucleoside
  modified_base 19: mod_base = OTHER; note = 2'-O-methyl modified nucleoside with phosphorothioate linkage
  modified_base 20: mod_base = OTHER; note = 2'-O-methyl modified nucleoside with phosphorothioate linkage
  modified_base 21: mod_base = OTHER; note = 2'-O-methyl modified nucleoside
gtacttcctggaatcgatatt

SEQ ID NO: 2394 - RNA, 21 nt, synthetic construct
  source 1..21: mol_type = other RNA
  modified_base 1: mod_base = OTHER; note = 2'-O-methyl modified nucleoside with phosphorothioate linkage
  modified_base 2: mod_base = OTHER; note = 2'-O-methyl modified nucleoside with phosphorothioate linkage
  modified_base 3: mod_base = OTHER; note = 2'-O-methyl modified nucleoside
  modified_base 4: mod_base = OTHER; note = 2'-O-methyl modified nucleoside
  modified_base 5: mod_base = OTHER; note = 2'-O-methyl modified nucleoside
  modified_base 6: mod_base = OTHER; note = 2'-O-methyl modified nucleoside
  modified_base 7: mod_base = OTHER; note = 2'-O-methyl modified nucleoside
  modified_base 8: mod_base = OTHER; note = 2'-O-methyl modified nucleoside
  modified_base 9: mod_base = OTHER; note = 2'-fluoro modified nucleoside
  modified_base 10: mod_base = OTHER; note = 2'-fluoro modified nucleoside
  modified_base 11: mod_base = OTHER; note = 2'-O-methyl modified nucleoside
  modified_base 12: mod_base = OTHER; note = 2'-O-methyl modified nucleoside
  modified_base 13: mod_base = OTHER; note = 2'-O-methyl modified nucleoside
  modified_base 14: mod_base = OTHER; note = 2'-O-methyl modified nucleoside
  modified_base 15: mod_base = OTHER; note = 2'-O-methyl modified nucleoside
  modified_base 16: mod_base = OTHER; note = 2'-O-methyl modified nucleoside
  modified_base 17: mod_base = OTHER; note = 2'-O-methyl modified nucleoside
  modified_base 18: mod_base = OTHER; note = 2'-O-methyl modified nucleoside
  modified_base 19: mod_base = OTHER; note = 2'-O-methyl modified nucleoside with phosphorothioate linkage
  modified_base 20: mod_base = OTHER; note = 2'-O-methyl modified nucleoside with phosphorothioate linkage
  modified_base 21: mod_base = OTHER; note = 2'-O-methyl modified nucleoside
tacttcctggaatcgataatt

SEQ ID NO: 2395 - RNA, 21 nt, synthetic construct
  source 1..21: mol_type = other RNA
  modified_base 1: mod_base = OTHER; note = 2'-O-methyl modified nucleoside with phosphorothioate linkage
  modified_base 2: mod_base = OTHER; note = 2'-O-methyl modified nucleoside with phosphorothioate linkage
  modified_base 3: mod_base = OTHER; note = 2'-O-methyl modified nucleoside
  modified_base 4: mod_base = OTHER; note = 2'-O-methyl modified nucleoside
  modified_base 5: mod_base = OTHER; note = 2'-O-methyl modified nucleoside
  modified_base 6: mod_base = OTHER; note = 2'-O-methyl modified nucleoside
  modified_base 7: mod_base = OTHER; note = 2'-fluoro modified nucleoside
  modified_base 8: mod_base = OTHER; note = 2'-fluoro modified nucleoside
  modified_base 9: mod_base = OTHER; note = 2'-fluoro modified nucleoside
  modified_base 10: mod_base = OTHER; note = 2'-fluoro modified nucleoside
  modified_base 11: mod_base = OTHER; note = 2'-O-methyl modified nucleoside
  modified_base 12: mod_base = OTHER; note = 2'-O-methyl modified nucleoside
  modified_base 13: mod_base = OTHER; note = 2'-O-methyl modified nucleoside
  modified_base 14: mod_base = OTHER; note = 2'-O-methyl modified nucleoside
  modified_base 15: mod_base = OTHER; note = 2'-O-methyl modified nucleoside
  modified_base 16: mod_base = OTHER; note = 2'-O-methyl modified nucleoside
  modified_base 17: mod_base = OTHER; note = 2'-O-methyl modified nucleoside
  modified_base 18: mod_base = OTHER; note = 2'-O-methyl modified nucleoside
  modified_base 19: mod_base = OTHER; note = 2'-O-methyl modified nucleoside with phosphorothioate linkage
  modified_base 20: mod_base = OTHER; note = 2'-O-methyl modified nucleoside with phosphorothioate linkage
  modified_base 21: mod_base = OTHER; note = 2'-O-methyl modified nucleoside
cttcctggaatcgatactatt

SEQ ID NO: 2396 - RNA, 21 nt, synthetic construct
  source 1..21: mol_type = other RNA
  modified_base 1: mod_base = OTHER; note = 2'-O-methyl modified nucleoside with phosphorothioate linkage
  modified_base 2: mod_base = OTHER; note = 2'-O-methyl modified nucleoside with phosphorothioate linkage
  modified_base 3: mod_base = OTHER; note = 2'-O-methyl modified nucleoside
  modified_base 4: mod_base = OTHER; note = 2'-O-methyl modified nucleoside
  modified_base 5: mod_base = OTHER; note = 2'-fluoro modified nucleoside
  modified_base 6: mod_base = OTHER; note = 2'-fluoro modified nucleoside
  modified_base 7: mod_base = OTHER; note = 2'-O-methyl modified nucleoside
  modified_base 8: mod_base = OTHER; note = 2'-O-methyl modified nucleoside
  modified_base 9: mod_base = OTHER; note = 2'-fluoro modified nucleoside
  modified_base 10: mod_base = OTHER; note = 2'-fluoro modified nucleoside
  modified_base 11: mod_base = OTHER; note = 2'-O-methyl modified nucleoside
  modified_base 12: mod_base = OTHER; note = 2'-O-methyl modified nucleoside
  modified_base 13: mod_base = OTHER; note = 2'-O-methyl modified nucleoside
  modified_base 14: mod_base = OTHER; note = 2'-O-methyl modified nucleoside
  modified_base 15: mod_base = OTHER; note = 2'-O-methyl modified nucleoside
  modified_base 16: mod_base = OTHER; note = 2'-O-methyl modified nucleoside
  modified_base 17: mod_base = OTHER; note = 2'-O-methyl modified nucleoside
  modified_base 18: mod_base = OTHER; note = 2'-O-methyl modified nucleoside
  modified_base 19: mod_base = OTHER; note = 2'-O-methyl modified nucleoside with phosphorothioate linkage
  modified_base 20: mod_base = OTHER; note = 2'-O-methyl modified nucleoside with phosphorothioate linkage
  modified_base 21: mod_base = OTHER; note = 2'-O-methyl modified nucleoside
ctggaatcgatacttgtaatt

SEQ ID NO: 2397 - RNA, 21 nt, synthetic construct
  source 1..21: mol_type = other RNA
  modified_base 1: mod_base = OTHER; note = 2'-O-methyl modified nucleoside with phosphorothioate linkage
  modified_base 2: mod_base = OTHER; note = 2'-O-methyl modified nucleoside with phosphorothioate linkage
  modified_base 3: mod_base = OTHER; note = 2'-O-methyl modified nucleoside
  modified_base 4: mod_base = OTHER; note = 2'-O-methyl modified nucleoside
  modified_base 5: mod_base = OTHER; note = 2'-O-methyl modified nucleoside
  modified_base 6: mod_base = OTHER; note = 2'-fluoro modified nucleoside
  modified_base 7: mod_base = OTHER; note = 2'-fluoro modified nucleoside
  modified_base 8: mod_base = OTHER; note = 2'-O-methyl modified nucleoside
  modified_base 9: mod_base = OTHER; note = 2'-fluoro modified nucleoside
  modified_base 10: mod_base = OTHER; note = 2'-O-methyl modified nucleoside
  modified_base 11: mod_base = OTHER; note = 2'-O-methyl modified nucleoside
  modified_base 12: mod_base = OTHER; note = 2'-O-methyl modified nucleoside
  modified_base 13: mod_base = OTHER; note = 2'-O-methyl modified nucleoside
  modified_base 14: mod_base = OTHER; note = 2'-O-methyl modified nucleoside
  modified_base 15: mod_base = OTHER; note = 2'-O-methyl modified nucleoside
  modified_base 16: mod_base = OTHER; note = 2'-O-methyl modified nucleoside
  modified_base 17: mod_base = OTHER; note = 2'-O-methyl modified nucleoside
  modified_base 18: mod_base = OTHER; note = 2'-O-methyl modified nucleoside
  modified_base 19: mod_base = OTHER; note = 2'-O-methyl modified nucleoside with phosphorothioate linkage
  modified_base 20: mod_base = OTHER; note = 2'-O-methyl modified nucleoside with phosphorothioate linkage
  modified_base 21: mod_base = OTHER; note = 2'-O-methyl modified nucleoside
gaatcgatacttgtatttatt

SEQ ID NO: 2398 - RNA, 21 nt, synthetic construct
  source 1..21: mol_type = other RNA
  modified_base 1: mod_base = OTHER; note = 2'-O-methyl modified nucleoside with phosphorothioate linkage
  modified_base 2: mod_base = OTHER; note = 2'-O-methyl modified nucleoside with phosphorothioate linkage
  modified_base 3: mod_base = OTHER; note = 2'-O-methyl modified nucleoside
  modified_base 4: mod_base = OTHER; note = 2'-O-methyl modified nucleoside
  modified_base 5: mod_base = OTHER; note = 2'-O-methyl modified nucleoside
  modified_base 6: mod_base = OTHER; note = 2'-fluoro modified nucleoside
  modified_base 7: mod_base = OTHER; note = 2'-O-methyl modified nucleoside
  modified_base 8: mod_base = OTHER; note = 2'-O-methyl modified nucleoside
  modified_base 9: mod_base = OTHER; note = 2'-fluoro modified nucleoside
  modified_base 10: mod_base = OTHER; note = 2'-fluoro modified nucleoside
  modified_base 11: mod_base = OTHER; note = 2'-O-methyl modified nucleoside
  modified_base 12: mod_base = OTHER; note = 2'-O-methyl modified nucleoside
  modified_base 13: mod_base = OTHER; note = 2'-O-methyl modified nucleoside
  modified_base 14: mod_base = OTHER; note = 2'-O-methyl modified nucleoside
  modified_base 15: mod_base = OTHER; note = 2'-O-methyl modified nucleoside
  modified_base 16: mod_base = OTHER; note = 2'-O-methyl modified nucleoside
  modified_base 17: mod_base = OTHER; note = 2'-O-methyl modified nucleoside
  modified_base 18: mod_base = OTHER; note = 2'-O-methyl modified nucleoside
  modified_base 19: mod_base = OTHER; note = 2'-O-methyl modified nucleoside with phosphorothioate linkage
  modified_base 20: mod_base = OTHER; note = 2'-O-methyl modified nucleoside with phosphorothioate linkage
  modified_base 21: mod_base = OTHER; note = 2'-O-methyl modified nucleoside
ctagtaccaagttacgtgatt

SEQ ID NO: 2399 - RNA, 21 nt, synthetic construct
  source 1..21: mol_type = other RNA
  modified_base 1: mod_base = OTHER; note = 2'-O-methyl modified nucleoside with phosphorothioate linkage
  modified_base 2: mod_base = OTHER; note = 2'-O-methyl modified nucleoside with phosphorothioate linkage
  modified_base 3: mod_base = OTHER; note = 2'-O-methyl modified nucleoside
  modified_base 4: mod_base = OTHER; note = 2'-O-methyl modified nucleoside
  modified_base 5: mod_base = OTHER; note = 2'-fluoro modified nucleoside
  modified_base 6: mod_base = OTHER; note = 2'-O-methyl modified nucleoside
  modified_base 7: mod_base = OTHER; note = 2'-O-methyl modified nucleoside
  modified_base 8: mod_base = OTHER; note = 2'-fluoro modified nucleoside
  modified_base 9: mod_base = OTHER; note = 2'-fluoro modified nucleoside
  modified_base 10: mod_base = OTHER; note = 2'-O-methyl modified nucleoside
  modified_base 11: mod_base = OTHER; note = 2'-O-methyl modified nucleoside
  modified_base 12: mod_base = OTHER; note = 2'-O-methyl modified nucleoside
  modified_base 13: mod_base = OTHER; note = 2'-O-methyl modified nucleoside
  modified_base 14: mod_base = OTHER; note = 2'-O-methyl modified nucleoside
  modified_base 15: mod_base = OTHER; note = 2'-O-methyl modified nucleoside
  modified_base 16: mod_base = OTHER; note = 2'-O-methyl modified nucleoside
  modified_base 17: mod_base = OTHER; note = 2'-O-methyl modified nucleoside
  modified_base 18: mod_base = OTHER; note = 2'-O-methyl modified nucleoside
  modified_base 19: mod_base = OTHER; note = 2'-O-methyl modified nucleoside with phosphorothioate linkage
  modified_base 20: mod_base = OTHER; note = 2'-O-methyl modified nucleoside with phosphorothioate linkage
  modified_base 21: mod_base = OTHER; note = 2'-O-methyl modified nucleoside
tagtaccaagttacgtgcatt

SEQ ID NO: 2400 - RNA, 21 nt, synthetic construct
  source 1..21: mol_type = other RNA
  modified_base 1: mod_base = OTHER; note = 2'-O-methyl modified nucleoside with phosphorothioate linkage
  modified_base 2: mod_base = OTHER; note = 2'-O-methyl modified nucleoside with phosphorothioate linkage
  modified_base 3: mod_base = OTHER; note = 2'-O-methyl modified nucleoside
  modified_base 4: mod_base = OTHER; note = 2'-O-methyl modified nucleoside
  modified_base 5: mod_base = OTHER; note = 2'-O-methyl modified nucleoside
  modified_base 6: mod_base = OTHER; note = 2'-O-methyl modified nucleoside
  modified_base 7: mod_base = OTHER; note = 2'-fluoro modified nucleoside
  modified_base 8: mod_base = OTHER; note = 2'-O-methyl modified nucleoside
  modified_base 9: mod_base = OTHER; note = 2'-fluoro modified nucleoside
  modified_base 10: mod_base = OTHER; note = 2'-O-methyl modified nucleoside
  modified_base 11: mod_base = OTHER; note = 2'-O-methyl modified nucleoside
  modified_base 12: mod_base = OTHER; note = 2'-O-methyl modified nucleoside
  modified_base 13: mod_base = OTHER; note = 2'-O-methyl modified nucleoside
  modified_base 14: mod_base = OTHER; note = 2'-O-methyl modified nucleoside
  modified_base 15: mod_base = OTHER; note = 2'-O-methyl modified nucleoside
  modified_base 16: mod_base = OTHER; note = 2'-O-methyl modified nucleoside
  modified_base 17: mod_base = OTHER; note = 2'-O-methyl modified nucleoside
  modified_base 18: mod_base = OTHER; note = 2'-O-methyl modified nucleoside
  modified_base 19: mod_base = OTHER; note = 2'-O-methyl modified nucleoside with phosphorothioate linkage
  modified_base 20: mod_base = OTHER; note = 2'-O-methyl modified nucleoside with phosphorothioate linkage
  modified_base 21: mod_base = OTHER; note = 2'-O-methyl modified nucleoside
agtaccaagttacgtgcaatt

SEQ ID NO: 2401 - RNA, 21 nt, synthetic construct
  source 1..21: mol_type = other RNA
  modified_base 1: mod_base = OTHER; note = 2'-O-methyl modified nucleoside with phosphorothioate linkage
  modified_base 2: mod_base = OTHER; note = 2'-O-methyl modified nucleoside with phosphorothioate linkage
  modified_base 3: mod_base = OTHER; note = 2'-O-methyl modified nucleoside
  modified_base 4: mod_base = OTHER; note = 2'-O-methyl modified nucleoside
  modified_base 5: mod_base = OTHER; note = 2'-fluoro modified nucleoside
  modified_base 6: mod_base = OTHER; note = 2'-O-methyl modified nucleoside
  modified_base 7: mod_base = OTHER; note = 2'-O-methyl modified nucleoside
  modified_base 8: mod_base = OTHER; note = 2'-O-methyl modified nucleoside
  modified_base 9: mod_base = OTHER; note = 2'-fluoro modified nucleoside
  modified_base 10: mod_base = OTHER; note = 2'-fluoro modified nucleoside
  modified_base 11: mod_base = OTHER; note = 2'-O-methyl modified nucleoside
  modified_base 12: mod_base = OTHER; note = 2'-O-methyl modified nucleoside
  modified_base 13: mod_base = OTHER; note = 2'-O-methyl modified nucleoside
  modified_base 14: mod_base = OTHER; note = 2'-O-methyl modified nucleoside
  modified_base 15: mod_base = OTHER; note = 2'-O-methyl modified nucleoside
  modified_base 16: mod_base = OTHER; note = 2'-O-methyl modified nucleoside
  modified_base 17: mod_base = OTHER; note = 2'-O-methyl modified nucleoside
  modified_base 18: mod_base = OTHER; note = 2'-O-methyl modified nucleoside
  modified_base 19: mod_base = OTHER; note = 2'-O-methyl modified nucleoside with phosphorothioate linkage
  modified_base 20: mod_base = OTHER; note = 2'-O-methyl modified nucleoside with phosphorothioate linkage
  modified_base 21: mod_base = OTHER; note = 2'-O-methyl modified nucleoside
gtaccaagttacgtgcacatt

SEQ ID NO: 2402 - RNA, 21 nt, synthetic construct
  source 1..21: mol_type = other RNA
  modified_base 1: mod_base = OTHER; note = 2'-O-methyl modified nucleoside with phosphorothioate linkage
  modified_base 2: mod_base = OTHER; note = 2'-O-methyl modified nucleoside with phosphorothioate linkage
  modified_base 3: mod_base = OTHER; note = 2'-O-methyl modified nucleoside
  modified_base 4: mod_base = OTHER; note = 2'-O-methyl modified nucleoside
  modified_base 5: mod_base = OTHER; note = 2'-O-methyl modified nucleoside
  modified_base 6: mod_base = OTHER; note = 2'-O-methyl modified nucleoside
  modified_base 7: mod_base = OTHER; note = 2'-O-methyl modified nucleoside
  modified_base 8: mod_base = OTHER; note = 2'-fluoro modified nucleoside
  modified_base 9: mod_base = OTHER; note = 2'-fluoro modified nucleoside
  modified_base 10: mod_base = OTHER; note = 2'-O-methyl modified nucleoside
  modified_base 11: mod_base = OTHER; note = 2'-fluoro modified nucleoside
  modified_base 12: mod_base = OTHER; note = 2'-O-methyl modified nucleoside
  modified_base 13: mod_base = OTHER; note = 2'-O-methyl modified nucleoside
  modified_base 14: mod_base = OTHER; note = 2'-O-methyl modified nucleoside
  modified_base 15: mod_base = OTHER; note = 2'-O-methyl modified nucleoside
  modified_base 16: mod_base = OTHER; note = 2'-O-methyl modified nucleoside
  modified_base 17: mod_base = OTHER; note = 2'-O-methyl modified nucleoside
  modified_base 18: mod_base = OTHER; note = 2'-O-methyl modified nucleoside
  modified_base 19: mod_base = OTHER; note = 2'-O-methyl modified nucleoside with phosphorothioate linkage
  modified_base 20: mod_base = OTHER; note = 2'-O-methyl modified nucleoside with phosphorothioate linkage
  modified_base 21: mod_base = OTHER; note = 2'-O-methyl modified nucleoside
taccaagttacgtgcaccatt

SEQ ID NO: 2403 - RNA, 21 nt, synthetic construct
  source 1..21: mol_type = other RNA
  modified_base 1: mod_base = OTHER; note = 2'-O-methyl modified nucleoside with phosphorothioate linkage
  modified_base 2: mod_base = OTHER; note = 2'-O-methyl modified nucleoside with phosphorothioate linkage
  modified_base 3: mod_base = OTHER; note = 2'-O-methyl modified nucleoside
  modified_base 4: mod_base = OTHER; note = 2'-O-methyl modified nucleoside
  modified_base 5: mod_base = OTHER; note = 2'-O-methyl modified nucleoside
  modified_base 6: mod_base = OTHER; note = 2'-fluoro modified nucleoside
  modified_base 7: mod_base = OTHER; note = 2'-fluoro modified nucleoside
  modified_base 8: mod_base = OTHER; note = 2'-O-methyl modified nucleoside
  modified_base 9: mod_base = OTHER; note = 2'-fluoro modified nucleoside
  modified_base 10: mod_base = OTHER; note = 2'-O-methyl modified nucleoside
  modified_base 11: mod_base = OTHER; note = 2'-fluoro modified nucleoside
  modified_base 12: mod_base = OTHER; note = 2'-O-methyl modified nucleoside
  modified_base 13: mod_base = OTHER; note = 2'-O-methyl modified nucleoside
  modified_base 14: mod_base = OTHER; note = 2'-O-methyl modified nucleoside
  modified_base 15: mod_base = OTHER; note = 2'-O-methyl modified nucleoside
  modified_base 16: mod_base = OTHER; note = 2'-O-methyl modified nucleoside
  modified_base 17: mod_base = OTHER; note = 2'-O-methyl modified nucleoside
  modified_base 18: mod_base = OTHER; note = 2'-O-methyl modified nucleoside
  modified_base 19: mod_base = OTHER; note = 2'-O-methyl modified nucleoside with phosphorothioate linkage
  modified_base 20: mod_base = OTHER; note = 2'-O-methyl modified nucleoside with phosphorothioate linkage
  modified_base 21: mod_base = OTHER; note = 2'-O-methyl modified nucleoside
ccaagttacgtgcaccaaatt

SEQ ID NO: 2404 - RNA, 21 nt, synthetic construct
  source 1..21: mol_type = other RNA
  modified_base 1: mod_base = OTHER; note = 2'-O-methyl modified nucleoside with phosphorothioate linkage
  modified_base 2: mod_base = OTHER; note = 2'-O-methyl modified nucleoside with phosphorothioate linkage
  modified_base 3: mod_base = OTHER; note = 2'-O-methyl modified nucleoside
  modified_base 4: mod_base = OTHER; note = 2'-O-methyl modified nucleoside
  modified_base 5: mod_base = OTHER; note = 2'-O-methyl modified nucleoside
  modified_base 6: mod_base = OTHER; note = 2'-O-methyl modified nucleoside
  modified_base 7: mod_base = OTHER; note = 2'-fluoro modified nucleoside
  modified_base 8: mod_base = OTHER; note = 2'-O-methyl modified nucleoside
  modified_base 9: mod_base = OTHER; note = 2'-fluoro modified nucleoside
  modified_base 10: mod_base = OTHER; note = 2'-O-methyl modified nucleoside
  modified_base 11: mod_base = OTHER; note = 2'-fluoro modified nucleoside
  modified_base 12: mod_base = OTHER; note = 2'-O-methyl modified nucleoside
  modified_base 13: mod_base = OTHER; note = 2'-O-methyl modified nucleoside
  modified_base 14: mod_base = OTHER; note = 2'-O-methyl modified nucleoside
  modified_base 15: mod_base = OTHER; note = 2'-O-methyl modified nucleoside
  modified_base 16: mod_base = OTHER; note = 2'-O-methyl modified nucleoside
  modified_base 17: mod_base = OTHER; note = 2'-O-methyl modified nucleoside
  modified_base 18: mod_base = OTHER; note = 2'-O-methyl modified nucleoside
  modified_base 19: mod_base = OTHER; note = 2'-O-methyl modified nucleoside with phosphorothioate linkage
  modified_base 20: mod_base = OTHER; note = 2'-O-methyl modified nucleoside with phosphorothioate linkage
  modified_base 21: mod_base = OTHER; note = 2'-O-methyl modified nucleoside
caagttacgtgcaccaaaatt

SEQ ID NO: 2405 - RNA, 21 nt, synthetic construct
  source 1..21: mol_type = other RNA
  modified_base 1: mod_base = OTHER; note = 2'-O-methyl modified nucleoside with phosphorothioate linkage
  modified_base 2: mod_base = OTHER; note = 2'-O-methyl modified nucleoside with phosphorothioate linkage
  modified_base 3: mod_base = OTHER; note = 2'-O-methyl modified nucleoside
  modified_base 4: mod_base = OTHER; note = 2'-O-methyl modified nucleoside
  modified_base 5: mod_base = OTHER; note = 2'-fluoro modified nucleoside
  modified_base 6: mod_base = OTHER; note = 2'-O-methyl modified nucleoside
  modified_base 7: mod_base = OTHER; note = 2'-fluoro modified nucleoside
  modified_base 8: mod_base = OTHER; note = 2'-O-methyl modified nucleoside
  modified_base 9: mod_base = OTHER; note = 2'-fluoro modified nucleoside
  modified_base 10: mod_base = OTHER; note = 2'-O-methyl modified nucleoside
  modified_base 11: mod_base = OTHER; note = 2'-fluoro modified nucleoside
  modified_base 12: mod_base = OTHER; note = 2'-O-methyl modified nucleoside
  modified_base 13: mod_base = OTHER; note = 2'-O-methyl modified nucleoside
  modified_base 14: mod_base = OTHER; note = 2'-O-methyl modified nucleoside
  modified_base 15: mod_base = OTHER; note = 2'-O-methyl modified nucleoside
  modified_base 16: mod_base = OTHER; note = 2'-O-methyl modified nucleoside
  modified_base 17: mod_base = OTHER; note = 2'-O-methyl modified nucleoside
  modified_base 18: mod_base = OTHER; note = 2'-O-methyl modified nucleoside
  modified_base 19: mod_base = OTHER; note = 2'-O-methyl modified nucleoside with phosphorothioate linkage
  modified_base 20: mod_base = OTHER; note = 2'-O-methyl modified nucleoside with phosphorothioate linkage
  modified_base 21: mod_base = OTHER; note = 2'-O-methyl modified nucleoside
aagttacgtgcaccaaatatt

SEQ ID NO: 2406 - RNA, 21 nt, synthetic construct
  source 1..21: mol_type = other RNA
  modified_base 1: mod_base = OTHER; note = 2'-O-methyl modified nucleoside with phosphorothioate linkage
  modified_base 2: mod_base = OTHER; note = 2'-O-methyl modified nucleoside with phosphorothioate linkage
  modified_base 3: mod_base = OTHER; note = 2'-O-methyl modified nucleoside
  modified_base 4: mod_base = OTHER; note = 2'-O-methyl modified nucleoside
  modified_base 5: mod_base = OTHER; note = 2'-fluoro modified nucleoside
  modified_base 6: mod_base = OTHER; note = 2'-O-methyl modified nucleoside
  modified_base 7: mod_base = OTHER; note = 2'-O-methyl modified nucleoside
  modified_base 8: mod_base = OTHER; note = 2'-O-methyl modified nucleoside
  modified_base 9: mod_base = OTHER; note = 2'-fluoro modified nucleoside
  modified_base 10: mod_base = OTHER; note = 2'-O-methyl modified nucleoside
  modified_base 11: mod_base = OTHER; note = 2'-fluoro modified nucleoside
  modified_base 12: mod_base = OTHER; note = 2'-O-methyl modified nucleoside
  modified_base 13: mod_base = OTHER; note = 2'-O-methyl modified nucleoside
  modified_base 14: mod_base = OTHER; note = 2'-O-methyl modified nucleoside
  modified_base 15: mod_base = OTHER; note = 2'-O-methyl modified nucleoside
  modified_base 16: mod_base = OTHER; note = 2'-O-methyl modified nucleoside
  modified_base 17: mod_base = OTHER; note = 2'-O-methyl modified nucleoside
  modified_base 18: mod_base = OTHER; note = 2'-O-methyl modified nucleoside
  modified_base 19: mod_base = OTHER; note = 2'-O-methyl modified nucleoside with phosphorothioate linkage
  modified_base 20: mod_base = OTHER; note = 2'-O-methyl modified nucleoside with phosphorothioate linkage
  modified_base 21: mod_base = OTHER; note = 2'-O-methyl modified nucleoside
gttacgtgcaccaaattaatt

SEQ ID NO: 2407 - RNA, 21 nt, synthetic construct
  source 1..21: mol_type = other RNA
  modified_base 1: mod_base = OTHER; note = 2'-O-methyl modified nucleoside with phosphorothioate linkage
  modified_base 2: mod_base = OTHER; note = 2'-O-methyl modified nucleoside with phosphorothioate linkage
  modified_base 3: mod_base = OTHER; note = 2'-O-methyl modified nucleoside
  modified_base 4: mod_base = OTHER; note = 2'-O-methyl modified nucleoside
  modified_base 5: mod_base = OTHER; note = 2'-fluoro modified nucleoside
  modified_base 6: mod_base = OTHER; note = 2'-O-methyl modified nucleoside
  modified_base 7: mod_base = OTHER; note = 2'-fluoro modified nucleoside
  modified_base 8: mod_base = OTHER; note = 2'-O-methyl modified nucleoside
  modified_base 9: mod_base = OTHER; note = 2'-fluoro modified nucleoside
  modified_base 10: mod_base = OTHER; note = 2'-O-methyl modified nucleoside
  modified_base 11: mod_base = OTHER; note = 2'-O-methyl modified nucleoside
  modified_base 12: mod_base = OTHER; note = 2'-O-methyl modified nucleoside
  modified_base 13: mod_base = OTHER; note = 2'-O-methyl modified nucleoside
  modified_base 14: mod_base = OTHER; note = 2'-O-methyl modified nucleoside
  modified_base 15: mod_base = OTHER; note = 2'-O-methyl modified nucleoside
  modified_base 16: mod_base = OTHER; note = 2'-O-methyl modified nucleoside
  modified_base 17: mod_base = OTHER; note = 2'-O-methyl modified nucleoside
  modified_base 18: mod_base = OTHER; note = 2'-O-methyl modified nucleoside
  modified_base 19: mod_base = OTHER; note = 2'-O-methyl modified nucleoside with phosphorothioate linkage
  modified_base 20: mod_base = OTHER; note = 2'-O-methyl modified nucleoside with phosphorothioate linkage
  modified_base 21: mod_base = OTHER; note = 2'-O-methyl modified nucleoside
ttacgtgcaccaaattatatt

SEQ ID NO: 2408 - RNA, 21 nt, synthetic construct
  source 1..21: mol_type = other RNA
  modified_base 1: mod_base = OTHER; note = 2'-O-methyl modified nucleoside with phosphorothioate linkage
  modified_base 2: mod_base = OTHER; note = 2'-O-methyl modified nucleoside with phosphorothioate linkage
  modified_base 3: mod_base = OTHER; note = 2'-O-methyl modified nucleoside
  modified_base 4: mod_base = OTHER; note = 2'-O-methyl modified nucleoside
  modified_base 5: mod_base = OTHER; note = 2'-O-methyl modified nucleoside
  modified_base 6: mod_base = OTHER; note = 2'-O-methyl modified nucleoside
  modified_base 7: mod_base = OTHER; note = 2'-O-methyl modified nucleoside
  modified_base 8: mod_base = OTHER; note = 2'-fluoro modified nucleoside
  modified_base 9: mod_base = OTHER; note = 2'-fluoro modified nucleoside
  modified_base 10: mod_base = OTHER; note = 2'-fluoro modified nucleoside
  modified_base 11: mod_base = OTHER; note = 2'-fluoro modified nucleoside
  modified_base 12: mod_base = OTHER; note = 2'-O-methyl modified nucleoside
  modified_base 13: mod_base = OTHER; note = 2'-O-methyl modified nucleoside
  modified_base 14: mod_base = OTHER; note = 2'-O-methyl modified nucleoside
  modified_base 15: mod_base = OTHER; note = 2'-O-methyl modified nucleoside
  modified_base 16: mod_base = OTHER; note = 2'-O-methyl modified nucleoside
  modified_base 17: mod_base = OTHER; note = 2'-O-methyl modified nucleoside
  modified_base 18: mod_base = OTHER; note = 2'-O-methyl modified nucleoside
  modified_base 19: mod_base = OTHER; note = 2'-O-methyl modified nucleoside with phosphorothioate linkage
  modified_base 20: mod_base = OTHER; note = 2'-O-methyl modified nucleoside with phosphorothioate linkage
  modified_base 21: mod_base = OTHER; note = 2'-O-methyl modified nucleoside
aagactcaaaagtaatatatt

SEQ ID NO: 2409 - RNA, 21 nt, synthetic construct
  source 1..21: mol_type = other RNA
  modified_base 1: mod_base = OTHER; note = 2'-O-methyl modified nucleoside with phosphorothioate linkage
  modified_base 2: mod_base = OTHER; note = 2'-O-methyl modified nucleoside with phosphorothioate linkage
  modified_base 3: mod_base = OTHER; note = 2'-O-methyl modified nucleoside
  modified_base 4: mod_base = OTHER; note = 2'-O-methyl modified nucleoside
  modified_base 5: mod_base = OTHER; note = 2'-fluoro modified nucleoside
  modified_base 6: mod_base = OTHER; note = 2'-fluoro modified nucleoside
  modified_base 7: mod_base = OTHER; note = 2'-O-methyl modified nucleoside
  modified_base 8: mod_base = OTHER; note = 2'-O-methyl modified nucleoside
  modified_base 9: mod_base = OTHER; note = 2'-fluoro modified nucleoside
  modified_base 10: mod_base = OTHER; note = 2'-fluoro modified nucleoside
  modified_base 11: mod_base = OTHER; note = 2'-O-methyl modified nucleoside
  modified_base 12: mod_base = OTHER; note = 2'-O-methyl modified nucleoside
  modified_base 13: mod_base = OTHER; note = 2'-O-methyl modified nucleoside
  modified_base 14: mod_base = OTHER; note = 2'-O-methyl modified nucleoside
  modified_base 15: mod_base = OTHER; note = 2'-O-methyl modified nucleoside
  modified_base 16: mod_base = OTHER; note = 2'-O-methyl modified nucleoside
  modified_base 17: mod_base = OTHER; note = 2'-O-methyl modified nucleoside
  modified_base 18: mod_base = OTHER; note = 2'-O-methyl modified nucleoside
  modified_base 19: mod_base = OTHER; note = 2'-O-methyl modified nucleoside with phosphorothioate linkage
  modified_base 20: mod_base = OTHER; note = 2'-O-methyl modified nucleoside with phosphorothioate linkage
  modified_base 21: mod_base = OTHER; note = 2'-O-methyl modified nucleoside
aaaatctactaaaaagtcatt

SEQ ID NO: 2410 - RNA, 21 nt, synthetic construct
  source 1..21: mol_type = other RNA
  modified_base 1: mod_base = OTHER; note = 2'-O-methyl modified nucleoside with phosphorothioate linkage
  modified_base 2: mod_base = OTHER; note = 2'-O-methyl modified nucleoside with phosphorothioate linkage
  modified_base 3: mod_base = OTHER; note = 2'-O-methyl modified nucleoside
  modified_base 4: mod_base = OTHER; note = 2'-O-methyl modified nucleoside
  modified_base 5: mod_base = OTHER; note = 2'-O-methyl modified nucleoside
  modified_base 6: mod_base = OTHER; note = 2'-O-methyl modified nucleoside
  modified_base 7: mod_base = OTHER; note = 2'-fluoro modified nucleoside
  modified_base 8: mod_base = OTHER; note = 2'-fluoro modified nucleoside
  modified_base 9: mod_base = OTHER; note = 2'-fluoro modified nucleoside
  modified_base 10: mod_base = OTHER; note = 2'-fluoro modified nucleoside
  modified_base 11: mod_base = OTHER; note = 2'-fluoro modified nucleoside
  modified_base 12: mod_base = OTHER; note = 2'-O-methyl modified nucleoside
  modified_base 13: mod_base = OTHER; note = 2'-O-methyl modified nucleoside
  modified_base 14: mod_base = OTHER; note = 2'-O-methyl modified nucleoside
  modified_base 15: mod_base = OTHER; note = 2'-O-methyl modified nucleoside
  modified_base 16: mod_base = OTHER; note = 2'-O-methyl modified nucleoside
  modified_base 17: mod_base = OTHER; note = 2'-O-methyl modified nucleoside
  modified_base 18: mod_base = OTHER; note = 2'-O-methyl modified nucleoside
  modified_base 19: mod_base = OTHER; note = 2'-O-methyl modified nucleoside with phosphorothioate linkage
  modified_base 20: mod_base = OTHER; note = 2'-O-methyl modified nucleoside with phosphorothioate linkage
  modified_base 21: mod_base = OTHER; note = 2'-O-methyl modified nucleoside
tctactaaaaagtctctgatt

SEQ ID NO: 2411 - RNA, 21 nt, synthetic construct
  source 1..21: mol_type = other RNA
  modified_base 1: mod_base = OTHER; note = 2'-O-methyl modified nucleoside with phosphorothioate linkage
  modified_base 2: mod_base = OTHER; note = 2'-O-methyl modified nucleoside with phosphorothioate linkage
  modified_base 3: mod_base = OTHER; note = 2'-O-methyl modified nucleoside
  modified_base 4: mod_base = OTHER; note = 2'-O-methyl modified nucleoside
  modified_base 5: mod_base = OTHER; note = 2'-fluoro modified nucleoside
  modified_base 6: mod_base = OTHER; note = 2'-O-methyl modified nucleoside
  modified_base 7: mod_base = OTHER; note = 2'-O-methyl modified nucleoside
  modified_base 8: mod_base = OTHER; note = 2'-fluoro modified nucleoside
  modified_base 9: mod_base = OTHER; note = 2'-fluoro modified nucleoside
  modified_base 10: mod_base = OTHER; note = 2'-fluoro modified nucleoside
  modified_base 11: mod_base = OTHER; note = 2'-fluoro modified nucleoside
  modified_base 12: mod_base = OTHER; note = 2'-O-methyl modified nucleoside
  modified_base 13: mod_base = OTHER; note = 2'-O-methyl modified nucleoside
  modified_base 14: mod_base = OTHER; note = 2'-O-methyl modified nucleoside
  modified_base 15: mod_base = OTHER; note = 2'-O-methyl modified nucleoside
  modified_base 16: mod_base = OTHER; note = 2'-O-methyl modified nucleoside
  modified_base 17: mod_base = OTHER; note = 2'-O-methyl modified nucleoside
  modified_base 18: mod_base = OTHER; note = 2'-O-methyl modified nucleoside
  modified_base 19: mod_base = OTHER; note = 2'-O-methyl modified nucleoside with phosphorothioate linkage
  modified_base 20: mod_base = OTHER; note = 2'-O-methyl modified nucleoside with phosphorothioate linkage
  modified_base 21: mod_base = OTHER; note = 2'-O-methyl modified nucleoside
tgaagacggggctagataatt

SEQ ID NO: 2412 - RNA, 21 nt, synthetic construct
  source 1..21: mol_type = other RNA
  modified_base 1: mod_base = OTHER; note = 2'-O-methyl modified nucleoside with phosphorothioate linkage
  modified_base 2: mod_base = OTHER; note = 2'-O-methyl modified nucleoside with phosphorothioate linkage
  modified_base 3: mod_base = OTHER; note = 2'-O-methyl modified nucleoside
  modified_base 4: mod_base = OTHER; note = 2'-O-methyl modified nucleoside
  modified_base 5: mod_base = OTHER; note = 2'-O-methyl modified nucleoside
  modified_base 6: mod_base = OTHER; note = 2'-fluoro modified nucleoside
  modified_base 7: mod_base = OTHER; note = 2'-O-methyl modified nucleoside
  modified_base 8: mod_base = OTHER; note = 2'-fluoro modified nucleoside
  modified_base 9: mod_base = OTHER; note = 2'-fluoro modified nucleoside
  modified_base 10: mod_base = OTHER; note = 2'-O-methyl modified nucleoside
  modified_base 11: mod_base = OTHER; note = 2'-O-methyl modified nucleoside
  modified_base 12: mod_base = OTHER; note = 2'-O-methyl modified nucleoside
  modified_base 13: mod_base = OTHER; note = 2'-O-methyl modified nucleoside
  modified_base 14: mod_base = OTHER; note = 2'-O-methyl modified nucleoside
  modified_base 15: mod_base = OTHER; note = 2'-O-methyl modified nucleoside
  modified_base 16: mod_base = OTHER; note = 2'-O-methyl modified nucleoside
  modified_base 17: mod_base = OTHER; note = 2'-O-methyl modified nucleoside
  modified_base 18: mod_base = OTHER; note = 2'-O-methyl modified nucleoside
  modified_base 19: mod_base = OTHER; note = 2'-O-methyl modified nucleoside with phosphorothioate linkage
  modified_base 20: mod_base = OTHER; note = 2'-O-methyl modified nucleoside with phosphorothioate linkage
  modified_base 21: mod_base = OTHER; note = 2'-O-methyl modified nucleoside
ctagatattgggagaaacatt

SEQ ID NO: 2413 - RNA, 21 nt, synthetic construct
  source 1..21: mol_type = other RNA
  modified_base 1: mod_base = OTHER; note = 2'-O-methyl modified nucleoside with phosphorothioate linkage
  modified_base 2: mod_base = OTHER; note = 2'-O-methyl modified nucleoside with phosphorothioate linkage
  modified_base 3: mod_base = OTHER; note = 2'-O-methyl modified nucleoside
  modified_base 4: mod_base = OTHER; note = 2'-O-methyl modified nucleoside
  modified_base 5: mod_base = OTHER; note = 2'-fluoro modified nucleoside
  modified_base 6: mod_base = OTHER; note = 2'-O-methyl modified nucleoside
  modified_base 7: mod_base = OTHER; note = 2'-O-methyl modified nucleoside
  modified_base 8: mod_base = OTHER; note = 2'-O-methyl modified nucleoside
  modified_base 9: mod_base = OTHER; note = 2'-fluoro modified nucleoside
  modified_base 10: mod_base = OTHER; note = 2'-fluoro modified nucleoside
  modified_base 11: mod_base = OTHER; note = 2'-O-methyl modified nucleoside
  modified_base 12: mod_base = OTHER; note = 2'-O-methyl modified nucleoside
  modified_base 13: mod_base = OTHER; note = 2'-O-methyl modified nucleoside
  modified_base 14: mod_base = OTHER; note = 2'-O-methyl modified nucleoside
  modified_base 15: mod_base = OTHER; note = 2'-O-methyl modified nucleoside
  modified_base 16: mod_base = OTHER; note = 2'-O-methyl modified nucleoside
  modified_base 17: mod_base = OTHER; note = 2'-O-methyl modified nucleoside
  modified_base 18: mod_base = OTHER; note = 2'-O-methyl modified nucleoside
  modified_base 19: mod_base = OTHER; note = 2'-O-methyl modified nucleoside with phosphorothioate linkage
  modified_base 20: mod_base = OTHER; note = 2'-O-methyl modified nucleoside with phosphorothioate linkage
  modified_base 21: mod_base = OTHER; note = 2'-O-methyl modified nucleoside
agcagaacggtgaaagtgatt

SEQ ID NO: 2414 - RNA, 21 nt, synthetic construct
  source 1..21: mol_type = other RNA
  modified_base 1: mod_base = OTHER; note = 2'-O-methyl modified nucleoside with phosphorothioate linkage
  modified_base 2: mod_base = OTHER; note = 2'-O-methyl modified nucleoside with phosphorothioate linkage
  modified_base 3: mod_base = OTHER; note = 2'-O-methyl modified nucleoside
  modified_base 4: mod_base = OTHER; note = 2'-O-methyl modified nucleoside
  modified_base 5: mod_base = OTHER; note = 2'-O-methyl modified nucleoside
  modified_base 6: mod_base = OTHER; note = 2'-fluoro modified nucleoside
  modified_base 7: mod_base = OTHER; note = 2'-O-methyl modified nucleoside
  modified_base 8: mod_base = OTHER; note = 2'-O-methyl modified nucleoside
  modified_base 9: mod_base = OTHER; note = 2'-fluoro modified nucleoside
  modified_base 10: mod_base = OTHER; note = 2'-O-methyl modified nucleoside
  modified_base 11: mod_base = OTHER; note = 2'-fluoro modified nucleoside
  modified_base 12: mod_base = OTHER; note = 2'-O-methyl modified nucleoside
  modified_base 13: mod_base = OTHER; note = 2'-O-methyl modified nucleoside
  modified_base 14: mod_base = OTHER; note = 2'-O-methyl modified nucleoside
  modified_base 15: mod_base = OTHER; note = 2'-O-methyl modified nucleoside
  modified_base 16: mod_base = OTHER; note = 2'-O-methyl modified nucleoside
  modified_base 17: mod_base = OTHER; note = 2'-O-methyl modified nucleoside
  modified_base 18: mod_base = OTHER; note = 2'-O-methyl modified nucleoside
  modified_base 19: mod_base = OTHER; note = 2'-O-methyl modified nucleoside with phosphorothioate linkage
  modified_base 20: mod_base = OTHER; note = 2'-O-methyl modified nucleoside with phosphorothioate linkage
  modified_base 21: mod_base = OTHER; note = 2'-O-methyl modified nucleoside
aaagtgggagatacattgatt

SEQ ID NO: 2415 - RNA, 21 nt, synthetic construct
  source 1..21: mol_type = other RNA
  modified_base 1: mod_base = OTHER; note = 2'-O-methyl modified nucleoside with phosphorothioate linkage
  modified_base 2: mod_base = OTHER; note = 2'-O-methyl modified nucleoside with phosphorothioate linkage
  modified_base 3: mod_base = OTHER; note = 2'-O-methyl modified nucleoside
  modified_base 4: mod_base = OTHER; note = 2'-O-methyl modified nucleoside
  modified_base 5: mod_base = OTHER; note = 2'-fluoro modified nucleoside
  modified_base 6: mod_base = OTHER; note = 2'-O-methyl modified nucleoside
  modified_base 7: mod_base = OTHER; note = 2'-fluoro modified nucleoside
  modified_base 8: mod_base = OTHER; note = 2'-O-methyl modified nucleoside
  modified_base 9: mod_base = OTHER; note = 2'-fluoro modified nucleoside
  modified_base 10: mod_base = OTHER; note = 2'-O-methyl modified nucleoside
  modified_base 11: mod_base = OTHER; note = 2'-O-methyl modified nucleoside
  modified_base 12: mod_base = OTHER; note = 2'-O-methyl modified nucleoside
  modified_base 13: mod_base = OTHER; note = 2'-O-methyl modified nucleoside
  modified_base 14: mod_base = OTHER; note = 2'-O-methyl modified nucleoside
  modified_base 15: mod_base = OTHER; note = 2'-O-methyl modified nucleoside
  modified_base 16: mod_base = OTHER; note = 2'-O-methyl modified nucleoside
  modified_base 17: mod_base = OTHER; note = 2'-O-methyl modified nucleoside
  modified_base 18: mod_base = OTHER; note = 2'-O-methyl modified nucleoside
  modified_base 19: mod_base = OTHER; note = 2'-O-methyl modified nucleoside with phosphorothioate linkage
  modified_base 20: mod_base = OTHER; note = 2'-O-methyl modified nucleoside with phosphorothioate linkage
  modified_base 21: mod_base = OTHER; note = 2'-O-methyl modified nucleoside
aagtgggagatacattggatt

SEQ ID NO: 2416 - RNA, 21 nt, synthetic construct
  source 1..21: mol_type = other RNA
  modified_base 1: mod_base = OTHER; note = 2'-O-methyl modified nucleoside with phosphorothioate linkage
  modified_base 2: mod_base = OTHER; note = 2'-O-methyl modified nucleoside with phosphorothioate linkage
  modified_base 3: mod_base = OTHER; note = 2'-O-methyl modified nucleoside
  modified_base 4: mod_base = OTHER; note = 2'-O-methyl modified nucleoside
  modified_base 5: mod_base = OTHER; note = 2'-O-methyl modified nucleoside
  modified_base 6: mod_base = OTHER; note = 2'-O-methyl modified nucleoside
  modified_base 7: mod_base = OTHER; note = 2'-fluoro modified nucleoside
  modified_base 8: mod_base = OTHER; note = 2'-O-methyl modified nucleoside
  modified_base 9: mod_base = OTHER; note = 2'-fluoro modified nucleoside
  modified_base 10: mod_base = OTHER; note = 2'-O-methyl modified nucleoside
  modified_base 11: mod_base = OTHER; note = 2'-fluoro modified nucleoside
  modified_base 12: mod_base = OTHER; note = 2'-O-methyl modified nucleoside
  modified_base 13: mod_base = OTHER; note = 2'-O-methyl modified nucleoside
  modified_base 14: mod_base = OTHER; note = 2'-O-methyl modified nucleoside
  modified_base 15: mod_base = OTHER; note = 2'-O-methyl modified nucleoside
  modified_base 16: mod_base = OTHER; note = 2'-O-methyl modified nucleoside
  modified_base 17: mod_base = OTHER; note = 2'-O-methyl modified nucleoside
  modified_base 18: mod_base = OTHER; note = 2'-O-methyl modified nucleoside
  modified_base 19: mod_base = OTHER; note = 2'-O-methyl modified nucleoside with phosphorothioate linkage
  modified_base 20: mod_base = OTHER; note = 2'-O-methyl modified nucleoside with phosphorothioate linkage
  modified_base 21: mod_base = OTHER; note = 2'-O-methyl modified nucleoside
agtgggagatacattggaatt

SEQ ID NO: 2417 - RNA, 21 nt, synthetic construct
  source 1..21: mol_type = other RNA
  modified_base 1: mod_base = OTHER; note = 2'-O-methyl modified nucleoside with phosphorothioate linkage
  modified_base 2: mod_base = OTHER; note = 2'-O-methyl modified nucleoside with phosphorothioate linkage
  modified_base 3: mod_base = OTHER; note = 2'-O-methyl modified nucleoside
  modified_base 4: mod_base = OTHER; note = 2'-O-methyl modified nucleoside
  modified_base 5: mod_base = OTHER; note = 2'-fluoro modified nucleoside
  modified_base 6: mod_base = OTHER; note = 2'-O-methyl modified nucleoside
  modified_base 7: mod_base = OTHER; note = 2'-fluoro modified nucleoside
  modified_base 8: mod_base = OTHER; note = 2'-O-methyl modified nucleoside
  modified_base 9: mod_base = OTHER; note = 2'-fluoro modified nucleoside
  modified_base 10: mod_base = OTHER; note = 2'-O-methyl modified nucleoside
  modified_base 11: mod_base = OTHER; note = 2'-fluoro modified nucleoside
  modified_base 12: mod_base = OTHER; note = 2'-O-methyl modified nucleoside
  modified_base 13: mod_base = OTHER; note = 2'-O-methyl modified nucleoside
  modified_base 14: mod_base = OTHER; note = 2'-O-methyl modified nucleoside
  modified_base 15: mod_base = OTHER; note = 2'-O-methyl modified nucleoside
  modified_base 16: mod_base = OTHER; note = 2'-O-methyl modified nucleoside
  modified_base 17: mod_base = OTHER; note = 2'-O-methyl modified nucleoside
  modified_base 18: mod_base = OTHER; note = 2'-O-methyl modified nucleoside
  modified_base 19: mod_base = OTHER; note = 2'-O-methyl modified nucleoside with phosphorothioate linkage
  modified_base 20: mod_base = OTHER; note = 2'-O-methyl modified nucleoside with phosphorothioate linkage
  modified_base 21: mod_base = OTHER; note = 2'-O-methyl modified nucleoside
tgggagatacattggatcatt

SEQ ID NO: 2418 - RNA, 21 nt, synthetic construct
  source 1..21: mol_type = other RNA
  modified_base 1: mod_base = OTHER; note = 2'-O-methyl modified nucleoside with phosphorothioate linkage
  modified_base 2: mod_base = OTHER; note = 2'-O-methyl modified nucleoside with phosphorothioate linkage
  modified_base 3: mod_base = OTHER; note = 2'-O-methyl modified nucleoside
  modified_base 4: mod_base = OTHER; note = 2'-O-methyl modified nucleoside
  modified_base 5: mod_base = OTHER; note = 2'-fluoro modified nucleoside
  modified_base 6: mod_base = OTHER; note = 2'-O-methyl modified nucleoside
  modified_base 7: mod_base = OTHER; note = 2'-O-methyl modified nucleoside
  modified_base 8: mod_base = OTHER; note = 2'-fluoro modified nucleoside
  modified_base 9: mod_base = OTHER; note = 2'-fluoro modified nucleoside
  modified_base 10: mod_base = OTHER; note = 2'-O-methyl modified nucleoside
  modified_base 11: mod_base = OTHER; note = 2'-O-methyl modified nucleoside
  modified_base 12: mod_base = OTHER; note = 2'-O-methyl modified nucleoside
  modified_base 13: mod_base = OTHER; note = 2'-O-methyl modified nucleoside
  modified_base 14: mod_base = OTHER; note = 2'-O-methyl modified nucleoside
  modified_base 15: mod_base = OTHER; note = 2'-O-methyl modified nucleoside
  modified_base 16: mod_base = OTHER; note = 2'-O-methyl modified nucleoside
  modified_base 17: mod_base = OTHER; note = 2'-O-methyl modified nucleoside
  modified_base 18: mod_base = OTHER; note = 2'-O-methyl modified nucleoside
  modified_base 19: mod_base = OTHER; note = 2'-O-methyl modified nucleoside with phosphorothioate linkage
  modified_base 20: mod_base = OTHER; note = 2'-O-methyl modified nucleoside with phosphorothioate linkage
  modified_base 21: mod_base = OTHER; note = 2'-O-methyl modified nucleoside
atacattggatcttctcaatt

SEQ ID NO: 2419 - RNA, 21 nt, synthetic construct
  source 1..21: mol_type = other RNA
  modified_base 1: mod_base = OTHER; note = 2'-O-methyl modified nucleoside with phosphorothioate linkage
  modified_base 2: mod_base = OTHER; note = 2'-O-methyl modified nucleoside with phosphorothioate linkage
  modified_base 3: mod_base = OTHER; note = 2'-O-methyl modified nucleoside
  modified_base 4: mod_base = OTHER; note = 2'-O-methyl modified nucleoside
  modified_base 5: mod_base = OTHER; note = 2'-O-methyl modified nucleoside
  modified_base 6: mod_base = OTHER; note = 2'-O-methyl modified nucleoside
  modified_base 7: mod_base = OTHER; note = 2'-O-methyl modified nucleoside
  modified_base 8: mod_base = OTHER; note = 2'-fluoro modified nucleoside
  modified_base 9: mod_base = OTHER; note = 2'-fluoro modified nucleoside
  modified_base 10: mod_base = OTHER; note = 2'-fluoro modified nucleoside
  modified_base 11: mod_base = OTHER; note = 2'-fluoro modified nucleoside
  modified_base 12: mod_base = OTHER; note = 2'-O-methyl modified nucleoside
  modified_base 13: mod_base = OTHER; note = 2'-O-methyl modified nucleoside
  modified_base 14: mod_base = OTHER; note = 2'-O-methyl modified nucleoside
  modified_base 15: mod_base = OTHER; note = 2'-O-methyl modified nucleoside
  modified_base 16: mod_base = OTHER; note = 2'-O-methyl modified nucleoside
  modified_base 17: mod_base = OTHER; note = 2'-O-methyl modified nucleoside
  modified_base 18: mod_base = OTHER; note = 2'-O-methyl modified nucleoside
  modified_base 19: mod_base = OTHER; note = 2'-O-methyl modified nucleoside with phosphorothioate linkage
  modified_base 20: mod_base = OTHER; note = 2'-O-methyl modified nucleoside with phosphorothioate linkage
  modified_base 21: mod_base = OTHER; note = 2'-O-methyl modified nucleoside
cattggatcttctcattgatt

SEQ ID NO: 2420 - RNA, 21 nt, synthetic construct
  source 1..21: mol_type = other RNA
  modified_base 1: mod_base = OTHER; note = 2'-O-methyl modified nucleoside with phosphorothioate linkage
  modified_base 2: mod_base = OTHER; note = 2'-O-methyl modified nucleoside with phosphorothioate linkage
  modified_base 3: mod_base = OTHER; note = 2'-O-methyl modified nucleoside
  modified_base 4: mod_base = OTHER; note = 2'-O-methyl modified nucleoside
  modified_base 5: mod_base = OTHER; note = 2'-O-methyl modified nucleoside
  modified_base 6: mod_base = OTHER; note = 2'-O-methyl modified nucleoside
  modified_base 7: mod_base = OTHER; note = 2'-fluoro modified nucleoside
  modified_base 8: mod_base = OTHER; note = 2'-O-methyl modified nucleoside
  modified_base 9: mod_base = OTHER; note = 2'-fluoro modified nucleoside
  modified_base 10: mod_base = OTHER; note = 2'-fluoro modified nucleoside
  modified_base 11: mod_base = OTHER; note = 2'-O-methyl modified nucleoside
  modified_base 12: mod_base = OTHER; note = 2'-O-methyl modified nucleoside
  modified_base 13: mod_base = OTHER; note = 2'-O-methyl modified nucleoside
  modified_base 14: mod_base = OTHER; note = 2'-O-methyl modified nucleoside
  modified_base 15: mod_base = OTHER; note = 2'-O-methyl modified nucleoside
  modified_base 16: mod_base = OTHER; note = 2'-O-methyl modified nucleoside
  modified_base 17: mod_base = OTHER; note = 2'-O-methyl modified nucleoside
  modified_base 18: mod_base = OTHER; note = 2'-O-methyl modified nucleoside
  modified_base 19: mod_base = OTHER; note = 2'-O-methyl modified nucleoside with phosphorothioate linkage
  modified_base 20: mod_base = OTHER; note = 2'-O-methyl modified nucleoside with phosphorothioate linkage
  modified_base 21: mod_base = OTHER; note = 2'-O-methyl modified nucleoside
attggatcttctcattggatt

SEQ ID NO: 2421 - RNA, 21 nt, synthetic construct
  source 1..21: mol_type = other RNA
  modified_base 1: mod_base = OTHER; note = 2'-O-methyl modified nucleoside with phosphorothioate linkage
  modified_base 2: mod_base = OTHER; note = 2'-O-methyl modified nucleoside with phosphorothioate linkage
  modified_base 3: mod_base = OTHER; note = 2'-O-methyl modified nucleoside
  modified_base 4: mod_base = OTHER; note = 2'-O-methyl modified nucleoside
  modified_base 5: mod_base = OTHER; note = 2'-O-methyl modified nucleoside
  modified_base 6: mod_base = OTHER; note = 2'-fluoro modified nucleoside
  modified_base 7: mod_base = OTHER; note = 2'-O-methyl modified nucleoside
  modified_base 8: mod_base = OTHER; note = 2'-fluoro modified nucleoside
  modified_base 9: mod_base = OTHER; note = 2'-fluoro modified nucleoside
  modified_base 10: mod_base = OTHER; note = 2'-O-methyl modified nucleoside
  modified_base 11: mod_base = OTHER; note = 2'-fluoro modified nucleoside
  modified_base 12: mod_base = OTHER; note = 2'-O-methyl modified nucleoside
  modified_base 13: mod_base = OTHER; note = 2'-O-methyl modified nucleoside
  modified_base 14: mod_base = OTHER; note = 2'-O-methyl modified nucleoside
  modified_base 15: mod_base = OTHER; note = 2'-O-methyl modified nucleoside
  modified_base 16: mod_base = OTHER; note = 2'-O-methyl modified nucleoside
  modified_base 17: mod_base = OTHER; note = 2'-O-methyl modified nucleoside
  modified_base 18: mod_base = OTHER; note = 2'-O-methyl modified nucleoside
  modified_base 19: mod_base = OTHER; note = 2'-O-methyl modified nucleoside with phosphorothioate linkage
  modified_base 20: mod_base = OTHER; note = 2'-O-methyl modified nucleoside with phosphorothioate linkage
  modified_base 21: mod_base = OTHER; note = 2'-O-methyl modified nucleoside
ttggatcttctcattggaatt

SEQ ID NO: 2422 - RNA, 21 nt, synthetic construct
  source 1..21: mol_type = other RNA
  modified_base 1: mod_base = OTHER; note = 2'-O-methyl modified nucleoside with phosphorothioate linkage
  modified_base 2: mod_base = OTHER; note = 2'-O-methyl modified nucleoside with phosphorothioate linkage
  modified_base 3: mod_base = OTHER; note = 2'-O-methyl modified nucleoside
  modified_base 4: mod_base = OTHER; note = 2'-O-methyl modified nucleoside
  modified_base 5: mod_base = OTHER; note = 2'-O-methyl modified nucleoside
  modified_base 6: mod_base = OTHER; note = 2'-fluoro modified nucleoside
  modified_base 7: mod_base = OTHER; note = 2'-O-methyl modified nucleoside
  modified_base 8: mod_base = OTHER; note = 2'-O-methyl modified nucleoside
  modified_base 9: mod_base = OTHER; note = 2'-fluoro modified nucleoside
  modified_base 10: mod_base = OTHER; note = 2'-O-methyl modified nucleoside
  modified_base 11: mod_base = OTHER; note = 2'-fluoro modified nucleoside
  modified_base 12: mod_base = OTHER; note = 2'-O-methyl modified nucleoside
  modified_base 13: mod_base = OTHER; note = 2'-O-methyl modified nucleoside
  modified_base 14: mod_base = OTHER; note = 2'-O-methyl modified nucleoside
  modified_base 15: mod_base = OTHER; note = 2'-O-methyl modified nucleoside
  modified_base 16: mod_base = OTHER; note = 2'-O-methyl modified nucleoside
  modified_base 17: mod_base = OTHER; note = 2'-O-methyl modified nucleoside
  modified_base 18: mod_base = OTHER; note = 2'-O-methyl modified nucleoside
  modified_base 19: mod_base = OTHER; note = 2'-O-methyl modified nucleoside with phosphorothioate linkage
  modified_base 20: mod_base = OTHER; note = 2'-O-methyl modified nucleoside with phosphorothioate linkage
  modified_base 21: mod_base = OTHER; note = 2'-O-methyl modified nucleoside
tggatcttctcattggagatt

SEQ ID NO: 2423 - RNA, 21 nt, synthetic construct
  source 1..21: mol_type = other RNA
  modified_base 1: mod_base = OTHER; note = 2'-O-methyl modified nucleoside with phosphorothioate linkage
  modified_base 2: mod_base = OTHER; note = 2'-O-methyl modified nucleoside with phosphorothioate linkage
  modified_base 3: mod_base = OTHER; note = 2'-O-methyl modified nucleoside
  modified_base 4: mod_base = OTHER; note = 2'-O-methyl modified nucleoside
  modified_base 5: mod_base = OTHER; note = 2'-fluoro modified nucleoside
  modified_base 6: mod_base = OTHER; note = 2'-O-methyl modified nucleoside
  modified_base 7: mod_base = OTHER; note = 2'-fluoro modified nucleoside
  modified_base 8: mod_base = OTHER; note = 2'-O-methyl modified nucleoside
  modified_base 9: mod_base = OTHER; note = 2'-fluoro modified nucleoside
  modified_base 10: mod_base = OTHER; note = 2'-O-methyl modified nucleoside
  modified_base 11: mod_base = OTHER; note = 2'-O-methyl modified nucleoside
  modified_base 12: mod_base = OTHER; note = 2'-O-methyl modified nucleoside
  modified_base 13: mod_base = OTHER; note = 2'-O-methyl modified nucleoside
  modified_base 14: mod_base = OTHER; note = 2'-O-methyl modified nucleoside
  modified_base 15: mod_base = OTHER; note = 2'-O-methyl modified nucleoside
  modified_base 16: mod_base = OTHER; note = 2'-O-methyl modified nucleoside
  modified_base 17: mod_base = OTHER; note = 2'-O-methyl modified nucleoside
  modified_base 18: mod_base = OTHER; note = 2'-O-methyl modified nucleoside
  modified_base 19: mod_base = OTHER; note = 2'-O-methyl modified nucleoside with phosphorothioate linkage
  modified_base 20: mod_base = OTHER; note = 2'-O-methyl modified nucleoside with phosphorothioate linkage
  modified_base 21: mod_base = OTHER; note = 2'-O-methyl modified nucleoside
gatcttctcattggagagatt

SEQ ID NO: 2424 - RNA, 21 nt, synthetic construct
  source 1..21: mol_type = other RNA
  modified_base 1: mod_base = OTHER; note = 2'-O-methyl modified nucleoside with phosphorothioate linkage
  modified_base 2: mod_base = OTHER; note = 2'-O-methyl modified nucleoside with phosphorothioate linkage
  modified_base 3: mod_base = OTHER; note = 2'-O-methyl modified nucleoside
  modified_base 4: mod_base = OTHER; note = 2'-O-methyl modified nucleoside
  modified_base 5: mod_base = OTHER; note = 2'-O-methyl modified nucleoside
  modified_base 6: mod_base = OTHER; note = 2'-fluoro modified nucleoside
  modified_base 7: mod_base = OTHER; note = 2'-O-methyl modified nucleoside
  modified_base 8: mod_base = OTHER; note = 2'-O-methyl modified nucleoside
  modified_base 9: mod_base = OTHER; note = 2'-fluoro modified nucleoside
  modified_base 10: mod_base = OTHER; note = 2'-fluoro modified nucleoside
  modified_base 11: mod_base = OTHER; note = 2'-O-methyl modified nucleoside
  modified_base 12: mod_base = OTHER; note = 2'-O-methyl modified nucleoside
  modified_base 13: mod_base = OTHER; note = 2'-O-methyl modified nucleoside
  modified_base 14: mod_base = OTHER; note = 2'-O-methyl modified nucleoside
  modified_base 15: mod_base = OTHER; note = 2'-O-methyl modified nucleoside
  modified_base 16: mod_base = OTHER; note = 2'-O-methyl modified nucleoside
  modified_base 17: mod_base = OTHER; note = 2'-O-methyl modified nucleoside
  modified_base 18: mod_base = OTHER; note = 2'-O-methyl modified nucleoside
  modified_base 19: mod_base = OTHER; note = 2'-O-methyl modified nucleoside with phosphorothioate linkage
  modified_base 20: mod_base = OTHER; note = 2'-O-methyl modified nucleoside with phosphorothioate linkage
  modified_base 21: mod_base = OTHER; note = 2'-O-methyl modified nucleoside
ttctcattggagaggataatt

SEQ ID NO: 2425 - RNA, 21 nt, synthetic construct
  source 1..21: mol_type = other RNA
  modified_base 1: mod_base = OTHER; note = 2'-O-methyl modified nucleoside with phosphorothioate linkage
  modified_base 2: mod_base = OTHER; note = 2'-O-methyl modified nucleoside with phosphorothioate linkage
  modified_base 3: mod_base = OTHER; note = 2'-O-methyl modified nucleoside
  modified_base 4: mod_base = OTHER; note = 2'-O-methyl modified nucleoside
  modified_base 5: mod_base = OTHER; note = 2'-O-methyl modified nucleoside
  modified_base 6: mod_base = OTHER; note = 2'-O-methyl modified nucleoside
  modified_base 7: mod_base = OTHER; note = 2'-fluoro modified nucleoside
  modified_base 8: mod_base = OTHER; note = 2'-fluoro modified nucleoside
  modified_base 9: mod_base = OTHER; note = 2'-fluoro modified nucleoside
  modified_base 10: mod_base = OTHER; note = 2'-fluoro modified nucleoside
  modified_base 11: mod_base = OTHER; note = 2'-fluoro modified nucleoside
  modified_base 12: mod_base = OTHER; note = 2'-O-methyl modified nucleoside
  modified_base 13: mod_base = OTHER; note = 2'-O-methyl modified nucleoside
  modified_base 14: mod_base = OTHER; note = 2'-O-methyl modified nucleoside
  modified_base 15: mod_base = OTHER; note = 2'-O-methyl modified nucleoside
  modified_base 16: mod_base = OTHER; note = 2'-O-methyl modified nucleoside
  modified_base 17: mod_base = OTHER; note = 2'-O-methyl modified nucleoside
  modified_base 18: mod_base = OTHER; note = 2'-O-methyl modified nucleoside
  modified_base 19: mod_base = OTHER; note = 2'-O-methyl modified nucleoside with phosphorothioate linkage
  modified_base 20: mod_base = OTHER; note = 2'-O-methyl modified nucleoside with phosphorothioate linkage
  modified_base 21: mod_base = OTHER; note = 2'-O-methyl modified nucleoside
ctcattggagaggataaaatt

SEQ ID NO: 2426 - RNA, 21 nt, synthetic construct
  source 1..21: mol_type = other RNA
  modified_base 1: mod_base = OTHER; note = 2'-O-methyl modified nucleoside with phosphorothioate linkage
  modified_base 2: mod_base = OTHER; note = 2'-O-methyl modified nucleoside with phosphorothioate linkage
  modified_base 3: mod_base = OTHER; note = 2'-O-methyl modified nucleoside
  modified_base 4: mod_base = OTHER; note = 2'-O-methyl modified nucleoside
  modified_base 5: mod_base = OTHER; note = 2'-fluoro modified nucleoside
  modified_base 6: mod_base = OTHER; note = 2'-fluoro modified nucleoside
  modified_base 7: mod_base = OTHER; note = 2'-O-methyl modified nucleoside
  modified_base 8: mod_base = OTHER; note = 2'-O-methyl modified nucleoside
  modified_base 9: mod_base = OTHER; note = 2'-fluoro modified nucleoside
  modified_base 10: mod_base = OTHER; note = 2'-O-methyl modified nucleoside
  modified_base 11: mod_base = OTHER; note = 2'-fluoro modified nucleoside
  modified_base 12: mod_base = OTHER; note = 2'-O-methyl modified nucleoside
  modified_base 13: mod_base = OTHER; note = 2'-O-methyl modified nucleoside
  modified_base 14: mod_base = OTHER; note = 2'-O-methyl modified nucleoside
  modified_base 15: mod_base = OTHER; note = 2'-O-methyl modified nucleoside
  modified_base 16: mod_base = OTHER; note = 2'-O-methyl modified nucleoside
  modified_base 17: mod_base = OTHER; note = 2'-O-methyl modified nucleoside
  modified_base 18: mod_base = OTHER; note = 2'-O-methyl modified nucleoside
  modified_base 19: mod_base = OTHER; note = 2'-O-methyl modified nucleoside with phosphorothioate linkage
  modified_base 20: mod_base = OTHER; note = 2'-O-methyl modified nucleoside with phosphorothioate linkage
  modified_base 21: mod_base = OTHER; note = 2'-O-methyl modified nucleoside
agacagttatgcggattcatt

SEQ ID NO: 2427 - RNA, 21 nt, synthetic construct
  source 1..21: mol_type = other RNA
  modified_base 1: mod_base = OTHER; note = 2'-O-methyl modified nucleoside with phosphorothioate linkage
  modified_base 2: mod_base = OTHER; note = 2'-O-methyl modified nucleoside with phosphorothioate linkage
  modified_base 3: mod_base = OTHER; note = 2'-O-methyl modified nucleoside
  modified_base 4: mod_base = OTHER; note = 2'-O-methyl modified nucleoside
  modified_base 5: mod_base = OTHER; note = 2'-O-methyl modified nucleoside
  modified_base 6: mod_base = OTHER; note = 2'-fluoro modified nucleoside
  modified_base 7: mod_base = OTHER; note = 2'-fluoro modified nucleoside
  modified_base 8: mod_base = OTHER; note = 2'-O-methyl modified nucleoside
  modified_base 9: mod_base = OTHER; note = 2'-fluoro modified nucleoside
  modified_base 10: mod_base = OTHER; note = 2'-O-methyl modified nucleoside
  modified_base 11: mod_base = OTHER; note = 2'-O-methyl modified nucleoside
  modified_base 12: mod_base = OTHER; note = 2'-O-methyl modified nucleoside
  modified_base 13: mod_base = OTHER; note = 2'-O-methyl modified nucleoside
  modified_base 14: mod_base = OTHER; note = 2'-O-methyl modified nucleoside
  modified_base 15: mod_base = OTHER; note = 2'-O-methyl modified nucleoside
  modified_base 16: mod_base = OTHER; note = 2'-O-methyl modified nucleoside
  modified_base 17: mod_base = OTHER; note = 2'-O-methyl modified nucleoside
  modified_base 18: mod_base = OTHER; note = 2'-O-methyl modified nucleoside
  modified_base 19: mod_base = OTHER; note = 2'-O-methyl modified nucleoside with phosphorothioate linkage
  modified_base 20: mod_base = OTHER; note = 2'-O-methyl modified nucleoside with phosphorothioate linkage
  modified_base 21: mod_base = OTHER; note = 2'-O-methyl modified nucleoside
gacagttatgcggattctatt

SEQ ID NO: 2428 - RNA, 21 nt, synthetic construct
  source 1..21: mol_type = other RNA
  modified_base 1: mod_base = OTHER; note = 2'-O-methyl modified nucleoside with phosphorothioate linkage
  modified_base 2: mod_base = OTHER; note = 2'-O-methyl modified nucleoside with phosphorothioate linkage
  modified_base 3: mod_base = OTHER; note = 2'-O-methyl modified nucleoside
  modified_base 4: mod_base = OTHER; note = 2'-O-methyl modified nucleoside
  modified_base 5: mod_base = OTHER; note = 2'-fluoro modified nucleoside
  modified_base 6: mod_base = OTHER; note = 2'-O-methyl modified nucleoside
  modified_base 7: mod_base = OTHER; note = 2'-fluoro modified nucleoside
  modified_base 8: mod_base = OTHER; note = 2'-O-methyl modified nucleoside
  modified_base 9: mod_base = OTHER; note = 2'-fluoro modified nucleoside
  modified_base 10: mod_base = OTHER; note = 2'-O-methyl modified nucleoside
  modified_base 11: mod_base = OTHER; note = 2'-O-methyl modified nucleoside
  modified_base 12: mod_base = OTHER; note = 2'-O-methyl modified nucleoside
  modified_base 13: mod_base = OTHER; note = 2'-O-methyl modified nucleoside
  modified_base 14: mod_base = OTHER; note = 2'-O-methyl modified nucleoside
  modified_base 15: mod_base = OTHER; note = 2'-O-methyl modified nucleoside
  modified_base 16: mod_base = OTHER; note = 2'-O-methyl modified nucleoside
  modified_base 17: mod_base = OTHER; note = 2'-O-methyl modified nucleoside
  modified_base 18: mod_base = OTHER; note = 2'-O-methyl modified nucleoside
  modified_base 19: mod_base = OTHER; note = 2'-O-methyl modified nucleoside with phosphorothioate linkage
  modified_base 20: mod_base = OTHER; note = 2'-O-methyl modified nucleoside with phosphorothioate linkage
  modified_base 21: mod_base = OTHER; note = 2'-O-methyl modified nucleoside
ttatgcggattctcttgaatt

SEQ ID NO: 2429 - RNA, 21 nt, synthetic construct
  source 1..21: mol_type = other RNA
  modified_base 1: mod_base = OTHER; note = 2'-O-methyl modified nucleoside with phosphorothioate linkage
  modified_base 2: mod_base = OTHER; note = 2'-O-methyl modified nucleoside with phosphorothioate linkage
  modified_base 3: mod_base = OTHER; note = 2'-O-methyl modified nucleoside
  modified_base 4: mod_base = OTHER; note = 2'-O-methyl modified nucleoside
  modified_base 5: mod_base = OTHER; note = 2'-fluoro modified nucleoside
  modified_base 6: mod_base = OTHER; note = 2'-O-methyl modified nucleoside
  modified_base 7: mod_base = OTHER; note = 2'-O-methyl modified nucleoside
  modified_base 8: mod_base = OTHER; note = 2'-O-methyl modified nucleoside
  modified_base 9: mod_base = OTHER; note = 2'-fluoro modified nucleoside
  modified_base 10: mod_base = OTHER; note = 2'-fluoro modified nucleoside
  modified_base 11: mod_base = OTHER; note = 2'-O-methyl modified nucleoside
  modified_base 12: mod_base = OTHER; note = 2'-O-methyl modified nucleoside
  modified_base 13: mod_base = OTHER; note = 2'-O-methyl modified nucleoside
  modified_base 14: mod_base = OTHER; note = 2'-O-methyl modified nucleoside
  modified_base 15: mod_base = OTHER; note = 2'-O-methyl modified nucleoside
  modified_base 16: mod_base = OTHER; note = 2'-O-methyl modified nucleoside
  modified_base 17: mod_base = OTHER; note = 2'-O-methyl modified nucleoside
  modified_base 18: mod_base = OTHER; note = 2'-O-methyl modified nucleoside
  modified_base 19: mod_base = OTHER; note = 2'-O-methyl modified nucleoside with phosphorothioate linkage
  modified_base 20: mod_base = OTHER; note = 2'-O-methyl modified nucleoside with phosphorothioate linkage
  modified_base 21: mod_base = OTHER; note = 2'-O-methyl modified nucleoside
tatgcggattctcttgaaatt

SEQ ID NO: 2430 - RNA, 21 nt, synthetic construct
  source 1..21: mol_type = other RNA
  modified_base 1: mod_base = OTHER; note = 2'-O-methyl modified nucleoside with phosphorothioate linkage
  modified_base 2: mod_base = OTHER; note = 2'-O-methyl modified nucleoside with phosphorothioate linkage
  modified_base 3: mod_base = OTHER; note = 2'-O-methyl modified nucleoside
  modified_base 4: mod_base = OTHER; note = 2'-O-methyl modified nucleoside
  modified_base 5: mod_base = OTHER; note = 2'-O-methyl modified nucleoside
  modified_base 6: mod_base = OTHER; note = 2'-O-methyl modified nucleoside
  modified_base 7: mod_base = OTHER; note = 2'-O-methyl modified nucleoside
  modified_base 8: mod_base = OTHER; note = 2'-fluoro modified nucleoside
  modified_base 9: mod_base = OTHER; note = 2'-fluoro modified nucleoside
  modified_base 10: mod_base = OTHER; note = 2'-O-methyl modified nucleoside
  modified_base 11: mod_base = OTHER; note = 2'-fluoro modified nucleoside
  modified_base 12: mod_base = OTHER; note = 2'-O-methyl modified nucleoside
  modified_base 13: mod_base = OTHER; note = 2'-O-methyl modified nucleoside
  modified_base 14: mod_base = OTHER; note = 2'-O-methyl modified nucleoside
  modified_base 15: mod_base = OTHER; note = 2'-O-methyl modified nucleoside
  modified_base 16: mod_base = OTHER; note = 2'-O-methyl modified nucleoside
  modified_base 17: mod_base = OTHER; note = 2'-O-methyl modified nucleoside
  modified_base 18: mod_base = OTHER; note = 2'-O-methyl modified nucleoside
  modified_base 19: mod_base = OTHER; note = 2'-O-methyl modified nucleoside with phosphorothioate linkage
  modified_base 20: mod_base = OTHER; note = 2'-O-methyl modified nucleoside with phosphorothioate linkage
  modified_base 21: mod_base = OTHER; note = 2'-O-methyl modified nucleoside
atgcggattctcttgaaaatt

SEQ ID NO: 2431 - RNA, 21 nt, synthetic construct
  source 1..21: mol_type = other RNA
  modified_base 1: mod_base = OTHER; note = 2'-O-methyl modified nucleoside with phosphorothioate linkage
  modified_base 2: mod_base = OTHER; note = 2'-O-methyl modified nucleoside with phosphorothioate linkage
  modified_base 3: mod_base = OTHER; note = 2'-O-methyl modified nucleoside
  modified_base 4: mod_base = OTHER; note = 2'-O-methyl modified nucleoside
  modified_base 5: mod_base = OTHER; note = 2'-fluoro modified nucleoside
  modified_base 6: mod_base = OTHER; note = 2'-O-methyl modified nucleoside
  modified_base 7: mod_base = OTHER; note = 2'-fluoro modified nucleoside
  modified_base 8: mod_base = OTHER; note = 2'-O-methyl modified nucleoside
  modified_base 9: mod_base = OTHER; note = 2'-fluoro modified nucleoside
  modified_base 10: mod_base = OTHER; note = 2'-fluoro modified nucleoside
  modified_base 11: mod_base = OTHER; note = 2'-O-methyl modified nucleoside
  modified_base 12: mod_base = OTHER; note = 2'-O-methyl modified nucleoside
  modified_base 13: mod_base = OTHER; note = 2'-O-methyl modified nucleoside
  modified_base 14: mod_base = OTHER; note = 2'-O-methyl modified nucleoside
  modified_base 15: mod_base = OTHER; note = 2'-O-methyl modified nucleoside
  modified_base 16: mod_base = OTHER; note = 2'-O-methyl modified nucleoside
  modified_base 17: mod_base = OTHER; note = 2'-O-methyl modified nucleoside
  modified_base 18: mod_base = OTHER; note = 2'-O-methyl modified nucleoside
  modified_base 19: mod_base = OTHER; note = 2'-O-methyl modified nucleoside with phosphorothioate linkage
  modified_base 20: mod_base = OTHER; note = 2'-O-methyl modified nucleoside with phosphorothioate linkage
  modified_base 21: mod_base = OTHER; note = 2'-O-methyl modified nucleoside
tacagagtggtgttacggatt

SEQ ID NO: 2432 - RNA, 21 nt, synthetic construct
  source 1..21: mol_type = other RNA
  modified_base 1: mod_base = OTHER; note = 2'-O-methyl modified nucleoside with phosphorothioate linkage
  modified_base 2: mod_base = OTHER; note = 2'-O-methyl modified nucleoside with phosphorothioate linkage
  modified_base 3: mod_base = OTHER; note = 2'-O-methyl modified nucleoside
  modified_base 4: mod_base = OTHER; note = 2'-O-methyl modified nucleoside
  modified_base 5: mod_base = OTHER; note = 2'-O-methyl modified nucleoside
  modified_base 6: mod_base = OTHER; note = 2'-O-methyl modified nucleoside
  modified_base 7: mod_base = OTHER; note = 2'-O-methyl modified nucleoside
  modified_base 8: mod_base = OTHER; note = 2'-fluoro modified nucleoside
  modified_base 9: mod_base = OTHER; note = 2'-fluoro modified nucleoside
  modified_base 10: mod_base = OTHER; note = 2'-O-methyl modified nucleoside
  modified_base 11: mod_base = OTHER; note = 2'-fluoro modified nucleoside
  modified_base 12: mod_base = OTHER; note = 2'-O-methyl modified nucleoside
  modified_base 13: mod_base = OTHER; note = 2'-O-methyl modified nucleoside
  modified_base 14: mod_base = OTHER; note = 2'-O-methyl modified nucleoside
  modified_base 15: mod_base = OTHER; note = 2'-O-methyl modified nucleoside
  modified_base 16: mod_base = OTHER; note = 2'-O-methyl modified nucleoside
  modified_base 17: mod_base = OTHER; note = 2'-O-methyl modified nucleoside
  modified_base 18: mod_base = OTHER; note = 2'-O-methyl modified nucleoside
  modified_base 19: mod_base = OTHER; note = 2'-O-methyl modified nucleoside with phosphorothioate linkage
  modified_base 20: mod_base = OTHER; note = 2'-O-methyl modified nucleoside with phosphorothioate linkage
  modified_base 21: mod_base = OTHER; note = 2'-O-methyl modified nucleoside
gtgttacggcggtggaaaatt

SEQ ID NO: 2433 - RNA, 21 nt, synthetic construct
  source 1..21: mol_type = other RNA
  modified_base 1: mod_base = OTHER; note = 2'-O-methyl modified nucleoside with phosphorothioate linkage
  modified_base 2: mod_base = OTHER; note = 2'-O-methyl modified nucleoside with phosphorothioate linkage
  modified_base 3: mod_base = OTHER; note = 2'-O-methyl modified nucleoside
  modified_base 4: mod_base = OTHER; note = 2'-O-methyl modified nucleoside
  modified_base 5: mod_base = OTHER; note = 2'-O-methyl modified nucleoside
  modified_base 6: mod_base = OTHER; note = 2'-fluoro modified nucleoside
  modified_base 7: mod_base = OTHER; note = 2'-O-methyl modified nucleoside
  modified_base 8: mod_base = OTHER; note = 2'-O-methyl modified nucleoside
  modified_base 9: mod_base = OTHER; note = 2'-fluoro modified nucleoside
  modified_base 10: mod_base = OTHER; note = 2'-O-methyl modified nucleoside
  modified_base 11: mod_base = OTHER; note = 2'-O-methyl modified nucleoside
  modified_base 12: mod_base = OTHER; note = 2'-O-methyl modified nucleoside
  modified_base 13: mod_base = OTHER; note = 2'-O-methyl modified nucleoside
  modified_base 14: mod_base = OTHER; note = 2'-O-methyl modified nucleoside
  modified_base 15: mod_base = OTHER; note = 2'-O-methyl modified nucleoside
  modified_base 16: mod_base = OTHER; note = 2'-O-methyl modified nucleoside
  modified_base 17: mod_base = OTHER; note = 2'-O-methyl modified nucleoside
  modified_base 18: mod_base = OTHER; note = 2'-O-methyl modified nucleoside
  modified_base 19: mod_base = OTHER; note = 2'-O-methyl modified nucleoside with phosphorothioate linkage
  modified_base 20: mod_base = OTHER; note = 2'-O-methyl modified nucleoside with phosphorothioate linkage
  modified_base 21: mod_base = OTHER; note = 2'-O-methyl modified nucleoside
tgttacggcggtggaaaaatt

SEQ ID NO: 2434 - RNA, 21 nt, synthetic construct
  source 1..21: mol_type = other RNA
  modified_base 1: mod_base = OTHER; note = 2'-O-methyl modified nucleoside with phosphorothioate linkage
  modified_base 2: mod_base = OTHER; note = 2'-O-methyl modified nucleoside with phosphorothioate linkage
  modified_base 3: mod_base = OTHER; note = 2'-O-methyl modified nucleoside
  modified_base 4: mod_base = OTHER; note = 2'-O-methyl modified nucleoside
  modified_base 5: mod_base = OTHER; note = 2'-O-methyl modified nucleoside
  modified_base 6: mod_base = OTHER; note = 2'-fluoro modified nucleoside
  modified_base 7: mod_base = OTHER; note = 2'-fluoro modified nucleoside
  modified_base 8: mod_base = OTHER; note = 2'-O-methyl modified nucleoside
  modified_base 9: mod_base = OTHER; note = 2'-fluoro modified nucleoside
  modified_base 10: mod_base = OTHER; note = 2'-fluoro modified nucleoside
  modified_base 11: mod_base = OTHER; note = 2'-O-methyl modified nucleoside
  modified_base 12: mod_base = OTHER; note = 2'-O-methyl modified nucleoside
  modified_base 13: mod_base = OTHER; note = 2'-O-methyl modified nucleoside
  modified_base 14: mod_base = OTHER; note = 2'-O-methyl modified nucleoside
  modified_base 15: mod_base = OTHER; note = 2'-O-methyl modified nucleoside
  modified_base 16: mod_base = OTHER; note = 2'-O-methyl modified nucleoside
  modified_base 17: mod_base = OTHER; note = 2'-O-methyl modified nucleoside
  modified_base 18: mod_base = OTHER; note = 2'-O-methyl modified nucleoside
  modified_base 19: mod_base = OTHER; note = 2'-O-methyl modified nucleoside with phosphorothioate linkage
  modified_base 20: mod_base = OTHER; note = 2'-O-methyl modified nucleoside with phosphorothioate linkage
  modified_base 21: mod_base = OTHER; note = 2'-O-methyl modified nucleoside
gttacggcggtggaaaagatt

SEQ ID NO: 2435 - RNA, 21 nt, synthetic construct
  source 1..21: mol_type = other RNA
  modified_base 1: mod_base = OTHER; note = 2'-O-methyl modified nucleoside with phosphorothioate linkage
  modified_base 2: mod_base = OTHER; note = 2'-O-methyl modified nucleoside with phosphorothioate linkage
  modified_base 3: mod_base = OTHER; note = 2'-O-methyl modified nucleoside
  modified_base 4: mod_base = OTHER; note = 2'-O-methyl modified nucleoside
  modified_base 5: mod_base = OTHER; note = 2'-fluoro modified nucleoside
  modified_base 6: mod_base = OTHER; note = 2'-fluoro modified nucleoside
  modified_base 7: mod_base = OTHER; note = 2'-O-methyl modified nucleoside
  modified_base 8: mod_base = OTHER; note = 2'-fluoro modified nucleoside
  modified_base 9: mod_base = OTHER; note = 2'-fluoro modified nucleoside
  modified_base 10: mod_base = OTHER; note = 2'-O-methyl modified nucleoside
  modified_base 11: mod_base = OTHER; note = 2'-fluoro modified nucleoside
  modified_base 12: mod_base = OTHER; note = 2'-O-methyl modified nucleoside
  modified_base 13: mod_base = OTHER; note = 2'-O-methyl modified nucleoside
  modified_base 14: mod_base = OTHER; note = 2'-O-methyl modified nucleoside
  modified_base 15: mod_base = OTHER; note = 2'-O-methyl modified nucleoside
  modified_base 16: mod_base = OTHER; note = 2'-O-methyl modified nucleoside
  modified_base 17: mod_base = OTHER; note = 2'-O-methyl modified nucleoside
  modified_base 18: mod_base = OTHER; note = 2'-O-methyl modified nucleoside
  modified_base 19: mod_base = OTHER; note = 2'-O-methyl modified nucleoside with phosphorothioate linkage
  modified_base 20: mod_base = OTHER; note = 2'-O-methyl modified nucleoside with phosphorothioate linkage
  modified_base 21: mod_base = OTHER; note = 2'-O-methyl modified nucleoside
ttacggcggtggaaaagtatt

SEQ ID NO: 2436 - RNA, 21 nt, synthetic construct
  source 1..21: mol_type = other RNA
  modified_base 1: mod_base = OTHER; note = 2'-O-methyl modified nucleoside with phosphorothioate linkage
  modified_base 2: mod_base = OTHER; note = 2'-O-methyl modified nucleoside with phosphorothioate linkage
  modified_base 3: mod_base = OTHER; note = 2'-O-methyl modified nucleoside
  modified_base 4: mod_base = OTHER; note = 2'-O-methyl modified nucleoside
  modified_base 5: mod_base = OTHER; note = 2'-O-methyl modified nucleoside
  modified_base 6: mod_base = OTHER; note = 2'-fluoro modified nucleoside
  modified_base 7: mod_base = OTHER; note = 2'-O-methyl modified nucleoside
  modified_base 8: mod_base = OTHER; note = 2'-O-methyl modified nucleoside
  modified_base 9: mod_base = OTHER; note = 2'-fluoro modified nucleoside
  modified_base 10: mod_base = OTHER; note = 2'-O-methyl modified nucleoside
  modified_base 11: mod_base = OTHER; note = 2'-O-methyl modified nucleoside
  modified_base 12: mod_base = OTHER; note = 2'-O-methyl modified nucleoside
  modified_base 13: mod_base = OTHER; note = 2'-O-methyl modified nucleoside
  modified_base 14: mod_base = OTHER; note = 2'-O-methyl modified nucleoside
  modified_base 15: mod_base = OTHER; note = 2'-O-methyl modified nucleoside
  modified_base 16: mod_base = OTHER; note = 2'-O-methyl modified nucleoside
  modified_base 17: mod_base = OTHER; note = 2'-O-methyl modified nucleoside
  modified_base 18: mod_base = OTHER; note = 2'-O-methyl modified nucleoside
  modified_base 19: mod_base = OTHER; note = 2'-O-methyl modified nucleoside with phosphorothioate linkage
  modified_base 20: mod_base = OTHER; note = 2'-O-methyl modified nucleoside with phosphorothioate linkage
  modified_base 21: mod_base = OTHER; note = 2'-O-methyl modified nucleoside
tacggcggtggaaaagttatt

SEQ ID NO: 2437 - RNA, 21 nt, synthetic construct
  source 1..21: mol_type = other RNA
  modified_base 1: mod_base = OTHER; note = 2'-O-methyl modified nucleoside with phosphorothioate linkage
  modified_base 2: mod_base = OTHER; note = 2'-O-methyl modified nucleoside with phosphorothioate linkage
  modified_base 3: mod_base = OTHER; note = 2'-O-methyl modified nucleoside
  modified_base 4: mod_base = OTHER; note = 2'-O-methyl modified nucleoside
  modified_base 5: mod_base = OTHER; note = 2'-fluoro modified nucleoside
  modified_base 6: mod_base = OTHER; note = 2'-fluoro modified nucleoside
  modified_base 7: mod_base = OTHER; note = 2'-O-methyl modified nucleoside
  modified_base 8: mod_base = OTHER; note = 2'-fluoro modified nucleoside
  modified_base 9: mod_base = OTHER; note = 2'-fluoro modified nucleoside
  modified_base 10: mod_base = OTHER; note = 2'-O-methyl modified nucleoside
  modified_base 11: mod_base = OTHER; note = 2'-O-methyl modified nucleoside
  modified_base 12: mod_base = OTHER; note = 2'-O-methyl modified nucleoside
  modified_base 13: mod_base = OTHER; note = 2'-O-methyl modified nucleoside
  modified_base 14: mod_base = OTHER; note = 2'-O-methyl modified nucleoside
  modified_base 15: mod_base = OTHER; note = 2'-O-methyl modified nucleoside
  modified_base 16: mod_base = OTHER; note = 2'-O-methyl modified nucleoside
  modified_base 17: mod_base = OTHER; note = 2'-O-methyl modified nucleoside
  modified_base 18: mod_base = OTHER; note = 2'-O-methyl modified nucleoside
  modified_base 19: mod_base = OTHER; note = 2'-O-methyl modified nucleoside with phosphorothioate linkage
  modified_base 20: mod_base = OTHER; note = 2'-O-methyl modified nucleoside with phosphorothioate linkage
  modified_base 21: mod_base = OTHER; note = 2'-O-methyl modified nucleoside
cggcggtggaaaagtttaatt

SEQ ID NO: 2438 - RNA, 21 nt, synthetic construct
  source 1..21: mol_type = other RNA
  modified_base 1: mod_base = OTHER; note = 2'-O-methyl modified nucleoside with phosphorothioate linkage
  modified_base 2: mod_base = OTHER; note = 2'-O-methyl modified nucleoside with phosphorothioate linkage
  modified_base 3: mod_base = OTHER; note = 2'-O-methyl modified nucleoside
  modified_base 4: mod_base = OTHER; note = 2'-O-methyl modified nucleoside
  modified_base 5: mod_base = OTHER; note = 2'-O-methyl modified nucleoside
  modified_base 6: mod_base = OTHER; note = 2'-fluoro modified nucleoside
  modified_base 7: mod_base = OTHER; note = 2'-fluoro modified nucleoside
  modified_base 8: mod_base = OTHER; note = 2'-fluoro modified nucleoside
  modified_base 9: mod_base = OTHER; note = 2'-fluoro modified nucleoside
  modified_base 10: mod_base = OTHER; note = 2'-O-methyl modified nucleoside
  modified_base 11: mod_base = OTHER; note = 2'-O-methyl modified nucleoside
  modified_base 12: mod_base = OTHER; note = 2'-O-methyl modified nucleoside
  modified_base 13: mod_base = OTHER; note = 2'-O-methyl modified nucleoside
  modified_base 14: mod_base = OTHER; note = 2'-O-methyl modified nucleoside
  modified_base 15: mod_base = OTHER; note = 2'-O-methyl modified nucleoside
  modified_base 16: mod_base = OTHER; note = 2'-O-methyl modified nucleoside
  modified_base 17: mod_base = OTHER; note = 2'-O-methyl modified nucleoside
  modified_base 18: mod_base = OTHER; note = 2'-O-methyl modified nucleoside
  modified_base 19: mod_base = OTHER; note = 2'-O-methyl modified nucleoside with phosphorothioate linkage
  modified_base 20: mod_base = OTHER; note = 2'-O-methyl modified nucleoside with phosphorothioate linkage
  modified_base 21: mod_base = OTHER; note = 2'-O-methyl modified nucleoside
agtttaaagttgcctaagatt

SEQ ID NO: 2439 - RNA, 21 nt, synthetic construct
  source 1..21: mol_type = other RNA
  modified_base 1: mod_base = OTHER; note = 2'-O-methyl modified nucleoside with phosphorothioate linkage
  modified_base 2: mod_base = OTHER; note = 2'-O-methyl modified nucleoside with phosphorothioate linkage
  modified_base 3: mod_base = OTHER; note = 2'-O-methyl modified nucleoside
  modified_base 4: mod_base = OTHER; note = 2'-O-methyl modified nucleoside
  modified_base 5: mod_base = OTHER; note = 2'-O-methyl modified nucleoside
  modified_base 6: mod_base = OTHER; note = 2'-O-methyl modified nucleoside
  modified_base 7: mod_base = OTHER; note = 2'-O-methyl modified nucleoside
  modified_base 8: mod_base = OTHER; note = 2'-fluoro modified nucleoside
  modified_base 9: mod_base = OTHER; note = 2'-fluoro modified nucleoside
  modified_base 10: mod_base = OTHER; note = 2'-O-methyl modified nucleoside
  modified_base 11: mod_base = OTHER; note = 2'-fluoro modified nucleoside
  modified_base 12: mod_base = OTHER; note = 2'-O-methyl modified nucleoside
  modified_base 13: mod_base = OTHER; note = 2'-O-methyl modified nucleoside
  modified_base 14: mod_base = OTHER; note = 2'-O-methyl modified nucleoside
  modified_base 15: mod_base = OTHER; note = 2'-O-methyl modified nucleoside
  modified_base 16: mod_base = OTHER; note = 2'-O-methyl modified nucleoside
  modified_base 17: mod_base = OTHER; note = 2'-O-methyl modified nucleoside
  modified_base 18: mod_base = OTHER; note = 2'-O-methyl modified nucleoside
  modified_base 19: mod_base = OTHER; note = 2'-O-methyl modified nucleoside with phosphorothioate linkage
  modified_base 20: mod_base = OTHER; note = 2'-O-methyl modified nucleoside with phosphorothioate linkage
  modified_base 21: mod_base = OTHER; note = 2'-O-methyl modified nucleoside
tttaaagttgcctaagaaatt

SEQ ID NO: 2440 - RNA, 21 nt, synthetic construct
  source 1..21: mol_type = other RNA
  modified_base 1: mod_base = OTHER; note = 2'-O-methyl modified nucleoside with phosphorothioate linkage
  modified_base 2: mod_base = OTHER; note = 2'-O-methyl modified nucleoside with phosphorothioate linkage
  modified_base 3: mod_base = OTHER; note = 2'-O-methyl modified nucleoside
  modified_base 4: mod_base = OTHER; note = 2'-O-methyl modified nucleoside
  modified_base 5: mod_base = OTHER; note = 2'-fluoro modified nucleoside
  modified_base 6: mod_base = OTHER; note = 2'-fluoro modified nucleoside
  modified_base 7: mod_base = OTHER; note = 2'-O-methyl modified nucleoside
  modified_base 8: mod_base = OTHER; note = 2'-O-methyl modified nucleoside
  modified_base 9: mod_base = OTHER; note = 2'-fluoro modified nucleoside
  modified_base 10: mod_base = OTHER; note = 2'-O-methyl modified nucleoside
  modified_base 11: mod_base = OTHER; note = 2'-fluoro modified nucleoside
  modified_base 12: mod_base = OTHER; note = 2'-O-methyl modified nucleoside
  modified_base 13: mod_base = OTHER; note = 2'-O-methyl modified nucleoside
  modified_base 14: mod_base = OTHER; note = 2'-O-methyl modified nucleoside
  modified_base 15: mod_base = OTHER; note = 2'-O-methyl modified nucleoside
  modified_base 16: mod_base = OTHER; note = 2'-O-methyl modified nucleoside
  modified_base 17: mod_base = OTHER; note = 2'-O-methyl modified nucleoside
  modified_base 18: mod_base = OTHER; note = 2'-O-methyl modified nucleoside
  modified_base 19: mod_base = OTHER; note = 2'-O-methyl modified nucleoside with phosphorothioate linkage
  modified_base 20: mod_base = OTHER; note = 2'-O-methyl modified nucleoside with phosphorothioate linkage
  modified_base 21: mod_base = OTHER; note = 2'-O-methyl modified nucleoside
tggattgctttttagcaaatt

SEQ ID NO: 2441 - RNA, 21 nt, synthetic construct
  source 1..21: mol_type = other RNA
  modified_base 1: mod_base = OTHER; note = 2'-O-methyl modified nucleoside with phosphorothioate linkage
  modified_base 2: mod_base = OTHER; note = 2'-O-methyl modified nucleoside with phosphorothioate linkage
  modified_base 3: mod_base = OTHER; note = 2'-O-methyl modified nucleoside
  modified_base 4: mod_base = OTHER; note = 2'-O-methyl modified nucleoside
  modified_base 5: mod_base = OTHER; note = 2'-O-methyl modified nucleoside
  modified_base 6: mod_base = OTHER; note = 2'-O-methyl modified nucleoside
  modified_base 7: mod_base = OTHER; note = 2'-O-methyl modified nucleoside
  modified_base 8: mod_base = OTHER; note = 2'-fluoro modified nucleoside
  modified_base 9: mod_base = OTHER; note = 2'-fluoro modified nucleoside
  modified_base 10: mod_base = OTHER; note = 2'-O-methyl modified nucleoside
  modified_base 11: mod_base = OTHER; note = 2'-fluoro modified nucleoside
  modified_base 12: mod_base = OTHER; note = 2'-O-methyl modified nucleoside
  modified_base 13: mod_base = OTHER; note = 2'-O-methyl modified nucleoside
  modified_base 14: mod_base = OTHER; note = 2'-O-methyl modified nucleoside
  modified_base 15: mod_base = OTHER; note = 2'-O-methyl modified nucleoside
  modified_base 16: mod_base = OTHER; note = 2'-O-methyl modified nucleoside
  modified_base 17: mod_base = OTHER; note = 2'-O-methyl modified nucleoside
  modified_base 18: mod_base = OTHER; note = 2'-O-methyl modified nucleoside
  modified_base 19: mod_base = OTHER; note = 2'-O-methyl modified nucleoside with phosphorothioate linkage
  modified_base 20: mod_base = OTHER; note = 2'-O-methyl modified nucleoside with phosphorothioate linkage
  modified_base 21: mod_base = OTHER; note = 2'-O-methyl modified nucleoside
gaaggggtcacctgaaaaatt

SEQ ID NO: 2442 - RNA, 21 nt, synthetic construct
  source 1..21: mol_type = other RNA
  modified_base 1: mod_base = OTHER; note = 2'-O-methyl modified nucleoside with phosphorothioate linkage
  modified_base 2: mod_base = OTHER; note = 2'-O-methyl modified nucleoside with phosphorothioate linkage
  modified_base 3: mod_base = OTHER; note = 2'-O-methyl modified nucleoside
  modified_base 4: mod_base = OTHER; note = 2'-O-methyl modified nucleoside
  modified_base 5: mod_base = OTHER; note = 2'-O-methyl modified nucleoside
  modified_base 6: mod_base = OTHER; note = 2'-O-methyl modified nucleoside
  modified_base 7: mod_base = OTHER; note = 2'-O-methyl modified nucleoside
  modified_base 8: mod_base = OTHER; note = 2'-O-methyl modified nucleoside
  modified_base 9: mod_base = OTHER; note = 2'-fluoro modified nucleoside
  modified_base 10: mod_base = OTHER; note = 2'-fluoro modified nucleoside
  modified_base 11: mod_base = OTHER; note = 2'-O-methyl modified nucleoside
  modified_base 12: mod_base = OTHER; note = 2'-O-methyl modified nucleoside
  modified_base 13: mod_base = OTHER; note = 2'-O-methyl modified nucleoside
  modified_base 14: mod_base = OTHER; note = 2'-O-methyl modified nucleoside
  modified_base 15: mod_base = OTHER; note = 2'-O-methyl modified nucleoside
  modified_base 16: mod_base = OTHER; note = 2'-O-methyl modified nucleoside
  modified_base 17: mod_base = OTHER; note = 2'-O-methyl modified nucleoside
  modified_base 18: mod_base = OTHER; note = 2'-O-methyl modified nucleoside
  modified_base 19: mod_base = OTHER; note = 2'-O-methyl modified nucleoside with phosphorothioate linkage
  modified_base 20: mod_base = OTHER; note = 2'-O-methyl modified nucleoside with phosphorothioate linkage
  modified_base 21: mod_base = OTHER; note = 2'-O-methyl modified nucleoside
aaataaagttctcttagcatt

SEQ ID NO: 2443 - DNA, 1146 bp, Homo sapiens
  source 1..1146: mol_type = genomic DNA
ggggtggggagggagcgagaggaatccgaccctgtctcagcccacagcctccgaggtctccaagtaaagggaaggatctttagctgcattagacttcaaagcgtttagaccagtttctccatcttacggagcggtgaacgggctcaggaatgtggagcgtttcctggcgtcaagcaggtcaaagtcagcgctgctttttttacagacactgcttttcttacagtcttcgactataaactctacaagaataggaatcttcgtatttttttcctctgctgaattcctagtgcccagattagtgcttggcacatgattataagcgccatggctatggctagtgttaaattgcttgccggtgttttaagaaagccagatgcctggattggactctggggtgttctccgagggacaccttcatcatacaaactctgtacttcctggaatcgatacttgtatttttctagtaccaagttacgtgcaccaaattataaaacacttttttataatattttctcactgagactcccagggcttttactatctccagaatgtatttttcctttttccgtaagactcaaaagtaatataaggtctacaaaatctactaaaaagtctctgcaaaaagtagatgaagaggactctgatgaagaaagccatcatgatgagatgagtgagcaggaagaggagcttgaggatgatcctactgtagtcaaaaactataaagacctggaaaaagcagttcagtcttttcggtatgatgttgtcctgaagacggggctagatattgggagaaacaaagtggaagatgctttctacaaaggtgaactcaggctgaatgaggaaaaattatggaagaaaagcagaacggtgaaagtgggagatacattggatcttctcattggagaggataaagaagcaggaacagagacagttatgcggattctcttgaaaaaagtgtttgaagagaagactgaaagtgaaaaatacagagtggtgttacggcggtggaaaagtttaaagttgcctaagaagagaatgtctaaataaatggattgctttttagcaatagagctgctttctagtggtaaaggaaggggtcacctgaaaaataggacatttttattaaaataaagttctcttagcgtt

SEQ ID NO: 2444-2461 - skipped (18 entries)

SEQ ID NO: 2462 - DNA, 1146 bp, Homo sapiens; identical to SEQ ID NO: 2443
  source 1..1146: mol_type = genomic DNA

SEQ ID NO: 2463 - RNA, 21 nt, synthetic construct
  source 1..21: mol_type = other RNA
  modified_base 1: mod_base = OTHER; note = 2'-fluoro modified nucleoside with phosphorothioate linkage
  modified_base 2: mod_base = OTHER; note = 2'-O-methyl modified nucleoside with phosphorothioate linkage
  modified_base 3: mod_base = OTHER; note = 2'-O-methyl modified nucleoside
  modified_base 4: mod_base = OTHER; note = 2'-O-methyl modified nucleoside
  modified_base 5: mod_base = OTHER; note = 2'-fluoro modified nucleoside
  modified_base 6: mod_base = OTHER; note = 2'-O-methyl modified nucleoside
  modified_base 7: mod_base = OTHER; note = 2'-fluoro modified nucleoside
  modified_base 8: mod_base = OTHER; note = 2'-O-methyl modified nucleoside
  modified_base 9: mod_base = OTHER; note = 2'-fluoro modified nucleoside
  modified_base 10: mod_base = OTHER; note = 2'-O-methyl modified nucleoside
  modified_base 11: mod_base = OTHER; note = 2'-fluoro modified nucleoside
  modified_base 12: mod_base = OTHER; note = 2'-O-methyl modified nucleoside
  modified_base 13: mod_base = OTHER; note = 2'-fluoro modified nucleoside
  modified_base 14: mod_base = OTHER; note = 2'-O-methyl modified nucleoside
  modified_base 15: mod_base = OTHER; note = 2'-fluoro modified nucleoside
  modified_base 16: mod_base = OTHER; note = 2'-O-methyl modified nucleoside
  modified_base 17: mod_base = OTHER; note = 2'-fluoro modified nucleoside
  modified_base 18: mod_base = OTHER; note = 2'-O-methyl modified nucleoside
  modified_base 19: mod_base = OTHER; note = 2'-O-methyl modified nucleoside with phosphorothioate linkage
  modified_base 20: mod_base = OTHER; note = 2'-O-methyl modified nucleoside with phosphorothioate linkage
  modified_base 21: mod_base = OTHER; note = 2'-O-methyl modified nucleoside
tcgatacttgtatttttcatt

SEQ ID NO: 2464 - RNA, 21 nt, synthetic construct
  source 1..21: mol_type = other RNA
  modified_base 1: mod_base = OTHER; note = 2'-O-methyl modified nucleoside with phosphorothioate linkage
  modified_base 2: mod_base = OTHER; note = 2'-O-methyl modified nucleoside with phosphorothioate linkage
  modified_base 3: mod_base = OTHER; note = 2'-fluoro modified nucleoside
  modified_base 4: mod_base = OTHER; note = 2'-O-methyl modified nucleoside
  modified_base 5: mod_base = OTHER; note = 2'-fluoro modified nucleoside
  modified_base 6: mod_base = OTHER; note = 2'-O-methyl modified nucleoside
  modified_base 7: mod_base = OTHER; note = 2'-fluoro modified nucleoside
  modified_base 8: mod_base = OTHER; note = 2'-O-methyl modified nucleoside
  modified_base 9: mod_base = OTHER; note = 2'-fluoro modified nucleoside
  modified_base 10: mod_base = OTHER; note = 2'-O-methyl modified nucleoside
  modified_base 11: mod_base = OTHER; note = 2'-fluoro modified nucleoside
  modified_base 12: mod_base = OTHER; note = 2'-O-methyl modified nucleoside
  modified_base 13: mod_base = OTHER; note = 2'-fluoro modified nucleoside
  modified_base 14: mod_base = OTHER; note = 2'-O-methyl modified nucleoside
  modified_base 15: mod_base = OTHER; note = 2'-O-methyl modified nucleoside
  modified_base 16: mod_base = OTHER; note = 2'-O-methyl modified nucleoside
  modified_base 17: mod_base = OTHER; note = 2'-fluoro modified nucleoside
  modified_base 18: mod_base = OTHER; note = 2'-O-methyl modified nucleoside
  modified_base 19: mod_base = OTHER; note = 2'-fluoro modified nucleoside with phosphorothioate linkage
  modified_base 20: mod_base = OTHER; note = 2'-O-methyl modified nucleoside with phosphorothioate linkage
  modified_base 21: mod_base = OTHER; note = 2'-O-methyl modified nucleoside
ctacaaaggtgaactcagatt

SEQ ID NO: 2465 - RNA, 21 nt, synthetic construct
  source 1..21: mol_type = other RNA
  modified_base 1: mod_base = OTHER; note = 2'-fluoro modified nucleoside with phosphorothioate linkage
  modified_base 2: mod_base = OTHER; note = 2'-O-methyl modified nucleoside with phosphorothioate linkage
  modified_base 3: mod_base = OTHER; note = 2'-fluoro modified nucleoside
  modified_base 4: mod_base = OTHER; note = 2'-O-methyl modified nucleoside
  modified_base 5: mod_base = OTHER; note = 2'-fluoro modified nucleoside
  modified_base 6: mod_base = OTHER; note = 2'-O-methyl modified nucleoside
  modified_base 7: mod_base = OTHER; note = 2'-fluoro modified nucleoside
  modified_base 8: mod_base = OTHER; note = 2'-O-methyl modified nucleoside
  modified_base 9: mod_base = OTHER; note = 2'-fluoro modified nucleoside
  modified_base 10: mod_base = OTHER; note = 2'-O-methyl modified nucleoside
  modified_base 11: mod_base = OTHER; note = 2'-fluoro modified nucleoside
  modified_base 12: mod_base = OTHER; note = 2'-O-methyl modified nucleoside
  modified_base 13: mod_base = OTHER; note = 2'-O-methyl modified nucleoside
  modified_base 14: mod_base = OTHER; note = 2'-O-methyl modified nucleoside
  modified_base 15: mod_base = OTHER; note = 2'-fluoro modified nucleoside
  modified_base 16: mod_base = OTHER; note = 2'-O-methyl modified nucleoside
  modified_base 17: mod_base = OTHER; note = 2'-fluoro modified nucleoside
  modified_base 18: mod_base = OTHER; note = 2'-O-methyl modified nucleoside
  modified_base 19: mod_base = OTHER; note = 2'-fluoro modified nucleoside with phosphorothioate linkage
  modified_base 20: mod_base = OTHER; note = 2'-O-methyl modified nucleoside with phosphorothioate linkage
  modified_base 21: mod_base = OTHER; note = 2'-O-methyl modified nucleoside
atggaagaaaagcagaacatt

SEQ ID NO: 2466 - RNA, 21 nt, synthetic construct
  source 1..21: mol_type = other RNA
  modified_base 1: mod_base = OTHER; note = 2'-O-methyl modified nucleoside with phosphorothioate linkage
  modified_base 2: mod_base = OTHER; note = 2'-O-methyl modified nucleoside with phosphorothioate linkage
  modified_base 3: mod_base = OTHER; note = 2'-O-methyl modified nucleoside
  modified_base 4: mod_base = OTHER; note = 2'-O-methyl modified nucleoside
  modified_base 5: mod_base = OTHER; note = 2'-O-methyl modified nucleoside
  modified_base 6: mod_base = OTHER; note = 2'-O-methyl modified nucleoside
  modified_base 7: mod_base = OTHER; note = 2'-fluoro modified nucleoside
  modified_base 8: mod_base = OTHER; note = 2'-O-methyl modified nucleoside
  modified_base 9: mod_base = OTHER; note = 2'-fluoro modified nucleoside
  modified_base 10: mod_base = OTHER; note = 2'-O-methyl modified nucleoside
  modified_base 11: mod_base = OTHER; note = 2'-fluoro modified nucleoside
  modified_base 12: mod_base = OTHER; note = 2'-O-methyl modified nucleoside
  modified_base 13: mod_base = OTHER; note = 2'-fluoro modified nucleoside
  modified_base 14: mod_base = OTHER; note = 2'-O-methyl modified nucleoside
  modified_base 15: mod_base = OTHER; note = 2'-fluoro modified nucleoside
  modified_base 16: mod_base = OTHER; note = 2'-O-methyl modified nucleoside
  modified_base 17: mod_base = OTHER; note = 2'-fluoro modified nucleoside
  modified_base 18: mod_base = OTHER; note = 2'-O-methyl modified nucleoside
  modified_base 19: mod_base = OTHER; note = 2'-fluoro modified nucleoside with phosphorothioate linkage
  modified_base 20: mod_base = OTHER; note = 2'-O-methyl modified nucleoside with phosphorothioate linkage
  modified_base 21: mod_base = OTHER; note = 2'-O-methyl modified nucleoside
ctttctacaaaggtgaacatt

SEQ ID NO: 2467 - RNA, 21 nt, synthetic construct
  source 1..21: mol_type = other RNA
  modified_base 1: mod_base = OTHER; note = 2'-O-methyl modified nucleoside with phosphorothioate linkage
  modified_base 2: mod_base = OTHER; note = 2'-fluoro modified nucleoside with phosphorothioate linkage
  modified_base 3: mod_base = OTHER; note = 2'-O-methyl modified nucleoside
  modified_base 4: mod_base = OTHER; note = 2'-fluoro modified nucleoside
  modified_base 5: mod_base = OTHER; note = 2'-O-methyl modified nucleoside
  modified_base 6: mod_base = OTHER; note = 2'-fluoro modified nucleoside
  modified_base 7: mod_base = OTHER; note = 2'-O-methyl modified nucleoside
  modified_base 8: mod_base = OTHER; note = 2'-fluoro modified nucleoside
  modified_base 9: mod_base = OTHER; note = 2'-O-methyl modified nucleoside
  modified_base 10: mod_base = OTHER; note = 2'-fluoro modified nucleoside
  modified_base 11: mod_base = OTHER; note = 2'-O-methyl modified nucleoside
  modified_base 12: mod_base = OTHER; note = 2'-fluoro modified nucleoside
  modified_base 13: mod_base = OTHER; note = 2'-O-methyl modified nucleoside
  modified_base 14: mod_base = OTHER; note = 2'-fluoro modified nucleoside
  modified_base 15: mod_base = OTHER; note = 2'-O-methyl modified nucleoside
  modified_base 16: mod_base = OTHER; note = 2'-fluoro modified nucleoside
  modified_base 17: mod_base = OTHER; note = 2'-O-methyl modified nucleoside
  modified_base 18: mod_base = OTHER; note = 2'-fluoro modified nucleoside
  modified_base 19: mod_base = OTHER; note = 2'-O-methyl modified nucleoside with phosphorothioate linkage
  modified_base 20: mod_base = OTHER; note = 2'-O-methyl modified nucleoside with phosphorothioate linkage
  modified_base 21: mod_base = OTHER; note = 2'-O-methyl modified nucleoside
tgaaaaatacaagtatcgatt

SEQ ID NO: 2468 - RNA, 21 nt, synthetic construct
  source 1..21: mol_type = other RNA
  modified_base 1: mod_base = OTHER; note = 2'-O-methyl modified nucleoside with phosphorothioate linkage
  modified_base 2: mod_base = OTHER; note = 2'-fluoro modified nucleoside with phosphorothioate linkage
  modified_base 3: mod_base = OTHER; note = 2'-O-methyl modified nucleoside
  modified_base 4: mod_base = OTHER; note = 2'-O-methyl modified nucleoside
  modified_base 5: mod_base = OTHER; note = 2'-O-methyl modified nucleoside
  modified_base 6: mod_base = OTHER; note = 2'-fluoro modified nucleoside
  modified_base 7: mod_base = OTHER; note = 2'-O-methyl modified nucleoside
  modified_base 8: mod_base = OTHER; note = 2'-fluoro modified nucleoside
  modified_base 9: mod_base = OTHER; note = 2'-O-methyl modified nucleoside
  modified_base 10: mod_base = OTHER; note = 2'-O-methyl modified nucleoside
  modified_base 11: mod_base = OTHER; note = 2'-O-methyl modified nucleoside
  modified_base 12: mod_base = OTHER; note = 2'-O-methyl modified nucleoside
  modified_base 13: mod_base = OTHER; note = 2'-O-methyl modified nucleoside
  modified_base 14: mod_base = OTHER; note = 2'-fluoro modified nucleoside
  modified_base 15: mod_base = OTHER; note = 2'-O-methyl modified nucleoside
  modified_base 16: mod_base = OTHER; note = 2'-fluoro modified nucleoside
  modified_base 17: mod_base = OTHER; note = 2'-O-methyl modified nucleoside
  modified_base 18: mod_base = OTHER; note = 2'-O-methyl modified nucleoside
  modified_base 19: mod_base = OTHER; note = 2'-O-methyl modified nucleoside with phosphorothioate linkage
  modified_base 20: mod_base = OTHER; note = 2'-O-methyl modified nucleoside with phosphorothioate linkage
  modified_base 21: mod_base = OTHER; note = 2'-O-methyl modified nucleoside
tctgagttcacctttgtagtt

SEQ ID NO: 2469 - RNA, 21 nt, synthetic construct
  source 1..21: mol_type = other RNA
  modified_base 1: mod_base = OTHER; note = 2'-O-methyl modified nucleoside with phosphorothioate linkage
  modified_base 2: mod_base = OTHER; note = 2'-fluoro modified nucleoside with phosphorothioate linkage
  modified_base 3: mod_base = OTHER; note = 2'-O-methyl modified nucleoside
  modified_base 4: mod_base = OTHER; note = 2'-O-methyl modified nucleoside
  modified_base 5: mod_base = OTHER; note = 2'-O-methyl modified nucleoside
  modified_base 6: mod_base = OTHER; note = 2'-fluoro modified nucleoside
  modified_base 7: mod_base = OTHER; note = 2'-O-methyl modified nucleoside
  modified_base 8: mod_base = OTHER; note = 2'-fluoro modified nucleoside
  modified_base 9: mod_base = OTHER; note = 2'-O-methyl modified nucleoside
  modified_base 10: mod_base = OTHER; note = 2'-O-methyl modified nucleoside
  modified_base 11: mod_base = OTHER; note = 2'-O-methyl modified nucleoside
  modified_base 12: mod_base = OTHER; note = 2'-O-methyl modified nucleoside
  modified_base 13: mod_base = OTHER; note = 2'-O-methyl modified nucleoside
  modified_base 14: mod_base = OTHER; note = 2'-fluoro modified nucleoside
  modified_base 15: mod_base = OTHER; note = 2'-O-methyl modified nucleoside
  modified_base 16: mod_base = OTHER; note = 2'-fluoro modified nucleoside
  modified_base 17: mod_base = OTHER; note = 2'-O-methyl modified nucleoside
  modified_base 18: mod_base = OTHER; note = 2'-O-methyl modified nucleoside
  modified_base 19: mod_base = OTHER; note = 2'-O-methyl modified nucleoside with phosphorothioate linkage
  modified_base 20: mod_base = OTHER; note = 2'-O-methyl modified nucleoside with phosphorothioate linkage
  modified_base 21: mod_base = OTHER; note = 2'-O-methyl modified nucleoside
tgttctgcttttcttccattt

SEQ ID NO: 2470 - RNA, 21 nt, synthetic construct
  source 1..21: mol_type = other RNA
  modified_base 1: mod_base = OTHER; note = 2'-O-methyl modified nucleoside with phosphorothioate linkage
  modified_base 2: mod_base = OTHER; note = 2'-fluoro modified nucleoside with phosphorothioate linkage
  modified_base 3: mod_base = OTHER; note = 2'-O-methyl modified nucleoside
  modified_base 4: mod_base = OTHER; note = 2'-fluoro modified nucleoside
  modified_base 5: mod_base = OTHER; note = 2'-O-methyl modified nucleoside
  modified_base 6: mod_base = OTHER; note = 2'-fluoro modified nucleoside
  modified_base 7: mod_base = OTHER; note = 2'-O-methyl modified nucleoside
  modified_base 8: mod_base = OTHER; note = 2'-fluoro modified nucleoside
  modified_base 9: mod_base = OTHER; note = 2'-O-methyl modified nucleoside
  modified_base 10: mod_base = OTHER; note = 2'-fluoro modified nucleoside
  modified_base 11: mod_base = OTHER; note = 2'-O-methyl modified nucleoside
  modified_base 12: mod_base = OTHER; note = 2'-fluoro modified nucleoside
  modified_base 13: mod_base = OTHER; note = 2'-O-methyl modified nucleoside
  modified_base 14: mod_base = OTHER; note = 2'-fluoro modified nucleoside
  modified_base 15: mod_base = OTHER; note = 2'-O-methyl modified nucleoside
  modified_base 16: mod_base = OTHER; note = 2'-fluoro modified nucleoside
  modified_base 17: mod_base = OTHER; note = 2'-O-methyl modified nucleoside
  modified_base 18: mod_base = OTHER; note = 2'-fluoro modified nucleoside
  modified_base 19: mod_base = OTHER; note = 2'-O-methyl modified nucleoside with phosphorothioate linkage
  modified_base 20: mod_base = OTHER; note = 2'-O-methyl modified nucleoside with phosphorothioate linkage
  modified_base 21: mod_base = OTHER; note = 2'-O-methyl modified nucleoside
tgttcacctttgtagaaagtt

SEQ ID NO: 2471 - RNA, 21 nt, synthetic construct
  source 1..21: mol_type = other RNA
  modified_base 1: mod_base = OTHER; note = 2'-O-methyl modified nucleoside with phosphorothioate linkage
  modified_base 2: mod_base = OTHER; note = 2'-O-methyl modified nucleoside
  modified_base 3: mod_base = OTHER; note = 2'-O-methyl modified nucleoside
  modified_base 4: mod_base = OTHER; note = 2'-O-methyl modified nucleoside
  modified_base 5: mod_base = OTHER; note = 2'-O-methyl modified nucleoside
  modified_base 6: mod_base = OTHER; note = 2'-O-methyl modified nucleoside
  modified_base 7: mod_base = OTHER; note = 2'-fluoro modified nucleoside
  modified_base 8: mod_base = OTHER; note = 2'-fluoro modified nucleoside
  modified_base 9: mod_base = OTHER; note = 2'-fluoro modified nucleoside
  modified_base 10: mod_base = OTHER; note = 2'-fluoro modified nucleoside
  modified_base 11: mod_base = OTHER; note = 2'-O-methyl modified nucleoside
  modified_base 12: mod_base = OTHER; note = 2'-O-methyl modified nucleoside
  modified_base 13: mod_base = OTHER; note = 2'-O-methyl modified nucleoside
  modified_base 14: mod_base = OTHER; note = 2'-O-methyl modified nucleoside
  modified_base 15: mod_base = OTHER; note = 2'-O-methyl modified nucleoside
  modified_base 16: mod_base = OTHER; note = 2'-O-methyl modified nucleoside
  modified_base 17: mod_base = OTHER; note = 2'-O-methyl modified nucleoside
  modified_base 18: mod_base = OTHER; note = 2'-O-methyl modified nucleoside
  modified_base 19: mod_base = OTHER; note = 2'-O-methyl modified nucleoside with phosphorothioate linkage
  modified_base 20: mod_base = OTHER; note = 2'-O-methyl modified nucleoside with phosphorothioate linkage
  modified_base 21: mod_base = OTHER; note = 2'-O-methyl modified nucleoside
tacaaactctgtacttccatt

SEQ ID NO: 2472 - RNA, 21 nt, synthetic construct
  source 1..21: mol_type = other RNA
  modified_base 1: mod_base = OTHER; note = 2'-O-methyl modified nucleoside with phosphorothioate linkage
  modified_base 2: mod_base = OTHER; note = 2'-O-methyl modified nucleoside
  modified_base 3: mod_base = OTHER; note = 2'-O-methyl modified nucleoside
  modified_base 4: mod_base = OTHER; note = 2'-O-methyl modified nucleoside
  modified_base 5: mod_base = OTHER; note = 2'-fluoro modified nucleoside
  modified_base 6: mod_base = OTHER; note = 2'-fluoro modified nucleoside
  modified_base 7: mod_base = OTHER; note = 2'-fluoro modified nucleoside
  modified_base 8: mod_base = OTHER; note = 2'-fluoro modified nucleoside
  modified_base 9: mod_base = OTHER; note = 2'-fluoro modified nucleoside
  modified_base 10: mod_base = OTHER; note = 2'-O-methyl modified nucleoside
  modified_base 11: mod_base = OTHER; note = 2'-O-methyl modified nucleoside
  modified_base 12: mod_base = OTHER; note = 2'-O-methyl modified nucleoside
  modified_base 13: mod_base = OTHER; note = 2'-O-methyl modified nucleoside
  modified_base 14: mod_base = OTHER; note = 2'-O-methyl modified nucleoside
  modified_base 15: mod_base = OTHER; note = 2'-O-methyl modified nucleoside
  modified_base 16: mod_base = OTHER; note = 2'-O-methyl modified nucleoside
  modified_base 17: mod_base = OTHER; note = 2'-O-methyl modified nucleoside
  modified_base 18: mod_base = OTHER; note = 2'-O-methyl modified nucleoside
  modified_base 19: mod_base = OTHER; note = 2'-O-methyl modified nucleoside with phosphorothioate linkage
  modified_base 20: mod_base = OTHER; note = 2'-O-methyl modified nucleoside with phosphorothioate linkage
  modified_base 21: mod_base = OTHER; note = 2'-O-methyl modified nucleoside
tgtacttcctggaatcgaatt

SEQ ID NO: 2473 - DNA, 21 bp, synthetic construct
  source 1..21: mol_type = other DNA
  modified_base 1: mod_base = OTHER; note = 2'-O-methyl modified nucleoside with phosphorothioate linkage
  modified_base 2: mod_base = OTHER; note = 2'-O-methyl modified nucleoside
  modified_base 3: mod_base = OTHER; note = 2'-O-methyl modified nucleoside
  modified_base 4: mod_base = OTHER; note = 2'-O-methyl modified nucleoside
  modified_base 5: mod_base = OTHER; note = 2'-fluoro modified nucleoside
  modified_base 6: mod_base = OTHER; note = 2'-O-methyl modified nucleoside
  modified_base 7: mod_base = OTHER; note = 2'-fluoro modified nucleoside
  modified_base 8: mod_base = OTHER; note = 2'-fluoro modified nucleoside
  modified_base 10: mod_base = OTHER; note = 2'-O-methyl modified nucleoside
  modified_base 11: mod_base = OTHER; note = 2'-O-methyl modified nucleoside
  modified_base 12: mod_base = OTHER; note = 2'-O-methyl modified nucleoside
  modified_base 13: mod_base = OTHER; note = 2'-O-methyl modified nucleoside
  modified_base 14: mod_base = OTHER; note = 2'-O-methyl modified nucleoside
  modified_base 15: mod_base = OTHER; note = 2'-O-methyl modified nucleoside
  modified_base 16: mod_base = OTHER; note = 2'-O-methyl modified nucleoside
  modified_base 17: mod_base = OTHER; note = 2'-O-methyl modified nucleoside
  modified_base 18: mod_base = OTHER; note = 2'-O-methyl modified nucleoside
  modified_base 19: mod_base = OTHER; note = 2'-O-methyl modified nucleoside with phosphorothioate linkage
  modified_base 20: mod_base = OTHER; note = 2'-O-methyl modified nucleoside with phosphorothioate linkage
  modified_base 21: mod_base = OTHER; note = 2'-O-methyl modified nucleoside
  misc_feature 1..8: note = RNA
  misc_feature 9: note = DNA
  misc_feature 10..21: note = RNA
tacttcctggaatcgataatt

SEQ ID NO: 2474 - RNA, 21 nt, synthetic construct
  source 1..21: mol_type = other RNA
  modified_base 1: mod_base = OTHER; note = 2'-O-methyl modified nucleoside with phosphorothioate linkage
  modified_base 2: mod_base = OTHER; note = 2'-O-methyl modified nucleoside
  modified_base 3: mod_base = OTHER; note = 2'-O-methyl modified nucleoside
  modified_base 4: mod_base = OTHER; note = 2'-O-methyl modified nucleoside
  modified_base 5: mod_base = OTHER; note = 2'-O-methyl modified nucleoside
  modified_base 6: mod_base = OTHER; note = 2'-fluoro modified nucleoside
  modified_base 7: mod_base = OTHER; note = 2'-fluoro modified nucleoside
  modified_base 8: mod_base = OTHER; note = 2'-O-methyl modified nucleoside
  modified_base 9: mod_base = OTHER; note = 2'-fluoro modified nucleoside
  modified_base 10: mod_base = OTHER; note = 2'-O-methyl modified nucleoside
  modified_base 11: mod_base = OTHER; note = 2'-O-methyl modified nucleoside
  modified_base 12: mod_base = OTHER; note = 2'-O-methyl modified nucleoside
  modified_base 13: mod_base = OTHER; note = 2'-O-methyl modified nucleoside
  modified_base 14: mod_base = OTHER; note = 2'-O-methyl modified nucleoside
  modified_base 15: mod_base = OTHER; note = 2'-O-methyl modified nucleoside
  modified_base 16: mod_base = OTHER; note = 2'-O-methyl modified nucleoside
  modified_base 17: mod_base = OTHER; note = 2'-O-methyl modified nucleoside
  modified_base 18: mod_base = OTHER; note = 2'-O-methyl modified nucleoside
  modified_base 19: mod_base = OTHER; note = 2'-O-methyl modified nucleoside with phosphorothioate linkage
  modified_base 20: mod_base = OTHER; note = 2'-O-methyl modified nucleoside with phosphorothioate linkage
  modified_base 21: mod_base = OTHER; note = 2'-O-methyl modified nucleoside
gaatcgatacttgtatttatt

SEQ ID NO: 2475 - RNA, 21 nt, synthetic construct
  source 1..21: mol_type = other RNA
  modified_base 1: mod_base = OTHER; note = 2'-O-methyl modified nucleoside with phosphorothioate linkage
  modified_base 2: mod_base = OTHER; note = 2'-O-methyl modified nucleoside
  modified_base 3: mod_base = OTHER; note = 2'-O-methyl modified nucleoside
  modified_base 4: mod_base = OTHER; note = 2'-O-methyl modified nucleoside
  modified_base 5: mod_base = OTHER; note = 2'-O-methyl modified nucleoside
  modified_base 6: mod_base = OTHER; note = 2'-O-methyl modified nucleoside
  modified_base 7: mod_base = OTHER; note = 2'-fluoro modified nucleoside
  modified_base 8: mod_base = OTHER; note = 2'-O-methyl modified nucleoside
  modified_base 9: mod_base = OTHER; note = 2'-fluoro modified nucleoside
  modified_base 10: mod_base = OTHER; note = 2'-fluoro modified nucleoside
  modified_base 11: mod_base = OTHER; note = 2'-O-methyl modified nucleoside
  modified_base 12: mod_base = OTHER; note = 2'-O-methyl modified nucleoside
  modified_base 13: mod_base = OTHER; note = 2'-O-methyl modified nucleoside
  modified_base 14: mod_base = OTHER; note = 2'-O-methyl modified nucleoside
  modified_base 15: mod_base = OTHER; note = 2'-O-methyl modified nucleoside
  modified_base 16: mod_base = OTHER; note = 2'-O-methyl modified nucleoside
  modified_base 17: mod_base = OTHER; note = 2'-O-methyl modified nucleoside
  modified_base 18: mod_base = OTHER; note = 2'-O-methyl modified nucleoside
  modified_base 19: mod_base = OTHER; note = 2'-O-methyl modified nucleoside with phosphorothioate linkage
  modified_base 20: mod_base = OTHER; note = 2'-O-methyl modified nucleoside with phosphorothioate linkage
  modified_base 21: mod_base = OTHER; note = 2'-O-methyl modified nucleoside
ttctagtaccaagttacgatt

SEQ ID NO: 2476 - RNA, 21 nt, synthetic construct
  source 1..21: mol_type = other RNA
  modified_base 1: mod_base = OTHER; note = 2'-O-methyl modified nucleoside with phosphorothioate linkage
  modified_base 2: mod_base = OTHER; note = 2'-O-methyl modified nucleoside
  modified_base 3: mod_base = OTHER; note = 2'-O-methyl modified nucleoside
  modified_base 4: mod_base = OTHER; note = 2'-O-methyl modified nucleoside
  modified_base 5: mod_base = OTHER; note = 2'-fluoro modified nucleoside
  modified_base 6: mod_base = OTHER; note = 2'-O-methyl modified nucleoside
  modified_base 7: mod_base = OTHER; note = 2'-fluoro modified nucleoside
  modified_base 8: mod_base = OTHER; note = 2'-O-methyl modified nucleoside
  modified_base 9: mod_base = OTHER; note = 2'-fluoro modified nucleoside
  modified_base 10: mod_base = OTHER; note = 2'-O-methyl modified nucleoside
  modified_base 11: mod_base = OTHER; note = 2'-fluoro modified nucleoside
  modified_base 12: mod_base = OTHER; note = 2'-O-methyl modified nucleoside
  modified_base 13: mod_base = OTHER; note = 2'-O-methyl modified nucleoside
  modified_base 14: mod_base = OTHER; note = 2'-O-methyl modified nucleoside
  modified_base 15: mod_base = OTHER; note = 2'-O-methyl modified nucleoside
  modified_base 16: mod_base = OTHER; note = 2'-O-methyl modified nucleoside
  modified_base 17: mod_base = OTHER; note = 2'-O-methyl modified nucleoside
  modified_base 18: mod_base = OTHER; note = 2'-O-methyl modified nucleoside
  modified_base 19: mod_base = OTHER; note = 2'-O-methyl modified nucleoside with phosphorothioate linkage
  modified_base 20: mod_base = OTHER; note = 2'-O-methyl modified nucleoside with phosphorothioate linkage
  modified_base 21: mod_base = OTHER; note = 2'-O-methyl modified nucleoside
agttacgtgcaccaaattatt

SEQ ID NO: 2477 - RNA, 21 nt, synthetic construct
  source 1..21: mol_type = other RNA
  modified_base 1: mod_base = OTHER; note = 2'-O-methyl modified nucleoside with phosphorothioate linkage
  modified_base 2: mod_base = OTHER; note = 2'-O-methyl modified nucleoside
  modified_base 3: mod_base = OTHER; note = 2'-O-methyl modified nucleoside
  modified_base 4: mod_base = OTHER; note = 2'-O-methyl modified nucleoside
  modified_base 5: mod_base = OTHER; note = 2'-fluoro modified nucleoside
  modified_base 6: mod_base = OTHER; note = 2'-O-methyl modified nucleoside
  modified_base 7: mod_base = OTHER; note = 2'-fluoro modified nucleoside
  modified_base 8: mod_base = OTHER; note = 2'-O-methyl modified nucleoside
  modified_base 9: mod_base = OTHER; note = 2'-fluoro modified nucleoside
  modified_base 10: mod_base = OTHER; note = 2'-O-methyl modified nucleoside
  modified_base 11: mod_base = OTHER; note = 2'-O-methyl modified nucleoside
  modified_base 12: mod_base = OTHER; note = 2'-O-methyl modified nucleoside
  modified_base 13: mod_base = OTHER; note = 2'-O-methyl modified nucleoside
  modified_base 14: mod_base = OTHER; note = 2'-O-methyl modified nucleoside
  modified_base 15: mod_base = OTHER; note = 2'-O-methyl modified nucleoside
  modified_base 16: mod_base = OTHER; note = 2'-O-methyl modified nucleoside
  modified_base 17: mod_base = OTHER; note = 2'-O-methyl modified nucleoside
  modified_base 18: mod_base = OTHER; note = 2'-O-methyl modified nucleoside
  modified_base 19: mod_base = OTHER; note = 2'-O-methyl modified nucleoside with phosphorothioate linkage
  modified_base 20: mod_base = OTHER; note = 2'-O-methyl modified nucleoside with phosphorothioate linkage
  modified_base 21: mod_base = OTHER; note = 2'-O-methyl modified nucleoside
ttacgtgcaccaaattatatt

SEQ ID NO: 2478 - RNA, 21 nt, synthetic construct
  source 1..21: mol_type = other RNA
  modified_base 1: mod_base = OTHER; note = 2'-O-methyl modified nucleoside with phosphorothioate linkage
  modified_base 2: mod_base = OTHER; note = 2'-O-methyl modified nucleoside
  modified_base 3: mod_base = OTHER; note = 2'-O-methyl modified nucleoside
  modified_base 4: mod_base = OTHER; note = 2'-O-methyl modified nucleoside
  modified_base 5: mod_base = OTHER; note = 2'-fluoro modified nucleoside
  modified_base 6: mod_base = OTHER; note = 2'-fluoro modified nucleoside
  modified_base 7: mod_base = OTHER; note = 2'-O-methyl modified nucleoside
  modified_base 8: mod_base = OTHER; note = 2'-O-methyl modified nucleoside
  modified_base 9: mod_base = OTHER; note = 2'-fluoro modified nucleoside
  modified_base 10: mod_base = OTHER; note = 2'-fluoro modified nucleoside
  modified_base 11: mod_base = OTHER; note = 2'-O-methyl modified nucleoside
  modified_base 12: mod_base = OTHER; note = 2'-O-methyl modified nucleoside
  modified_base 13: mod_base = OTHER; note = 2'-O-methyl modified nucleoside
  modified_base 14: mod_base = OTHER; note = 2'-O-methyl modified nucleoside
  modified_base 15: mod_base = OTHER; note = 2'-O-methyl modified nucleoside
  modified_base 16: mod_base = OTHER; note = 2'-O-methyl modified nucleoside
  modified_base 17: mod_base = OTHER; note = 2'-O-methyl modified nucleoside
  modified_base 18: mod_base = OTHER; note = 2'-O-methyl modified nucleoside
  modified_base 19: mod_base = OTHER; note = 2'-O-methyl modified nucleoside with phosphorothioate linkage
  modified_base 20: mod_base = OTHER; note = 2'-O-methyl modified nucleoside with phosphorothioate linkage
  modified_base 21: mod_base = OTHER; note = 2'-O-methyl modified nucleoside
aaaatctactaaaaagtcatt

SEQ ID NO: 2479 - RNA, 21 nt, synthetic construct
  source 1..21: mol_type = other RNA
  modified_base 1: mod_base = OTHER; note = 2'-O-methyl modified nucleoside with phosphorothioate linkage
  modified_base 2: mod_base = OTHER; note = 2'-O-methyl modified nucleoside
  modified_base 3: mod_base = OTHER; note = 2'-O-methyl modified nucleoside
  modified_base 4: mod_base = OTHER; note = 2'-O-methyl modified nucleoside
  modified_base 5: mod_base = OTHER; note = 2'-fluoro modified nucleoside
  modified_base 6: mod_base = OTHER; note = 2'-O-methyl modified nucleoside
  modified_base 7: mod_base = OTHER; note = 2'-O-methyl modified nucleoside
  modified_base 8: mod_base = OTHER; note = 2'-fluoro modified nucleoside
  modified_base 9: mod_base = OTHER; note = 2'-fluoro modified nucleoside
  modified_base 10: mod_base = OTHER; note = 2'-fluoro modified nucleoside
  modified_base 11: mod_base = OTHER; note = 2'-fluoro modified nucleoside
  modified_base 12: mod_base = OTHER; note = 2'-O-methyl modified nucleoside
  modified_base 13: mod_base = OTHER; note = 2'-O-methyl modified nucleoside
  modified_base 14: mod_base = OTHER; note = 2'-O-methyl modified nucleoside
  modified_base 15: mod_base = OTHER; note = 2'-O-methyl modified nucleoside
  modified_base 16: mod_base = OTHER; note = 2'-O-methyl modified nucleoside
  modified_base 17: mod_base = OTHER; note = 2'-O-methyl modified nucleoside
  modified_base 18: mod_base = OTHER; note = 2'-O-methyl modified nucleoside
  modified_base 19: mod_base = OTHER; note = 2'-O-methyl modified nucleoside with phosphorothioate linkage
  modified_base 20: mod_base = OTHER; note = 2'-O-methyl modified nucleoside with phosphorothioate linkage
  modified_base 21: mod_base = OTHER; note = 2'-O-methyl modified nucleoside
atctactaaaaagtctctatt

SEQ ID NO: 2480 - RNA, 21 nt, synthetic construct
  source 1..21: mol_type = other RNA
  modified_base 1: mod_base = OTHER; note = 2'-O-methyl modified nucleoside with phosphorothioate linkage
  modified_base 2: mod_base = OTHER; note = 2'-O-methyl modified nucleoside
  modified_base 3: mod_base = OTHER; note = 2'-O-methyl modified nucleoside
  modified_base 4: mod_base = OTHER; note = 2'-O-methyl modified nucleoside
  modified_base 5: mod_base = OTHER; note = 2'-O-methyl modified nucleoside
  modified_base 6: mod_base = OTHER; note = 2'-fluoro modified nucleoside
  modified_base 7: mod_base = OTHER; note = 2'-O-methyl modified nucleoside
  modified_base 8: mod_base = OTHER; note = 2'-fluoro modified nucleoside
  modified_base 9: mod_base = OTHER; note = 2'-fluoro modified nucleoside
  modified_base 10: mod_base = OTHER; note = 2'-O-methyl modified nucleoside
  modified_base 11: mod_base = OTHER; note = 2'-O-methyl modified nucleoside
  modified_base 12: mod_base = OTHER; note = 2'-O-methyl modified nucleoside
  modified_base 13: mod_base = OTHER; note = 2'-O-methyl modified nucleoside
  modified_base 14: mod_base = OTHER; note = 2'-O-methyl modified nucleoside
  modified_base 15: mod_base = OTHER; note = 2'-O-methyl modified nucleoside
  modified_base 16: mod_base = OTHER; note = 2'-O-methyl modified nucleoside
  modified_base 17: mod_base = OTHER; note = 2'-O-methyl modified nucleoside
  modified_base 18: mod_base = OTHER; note = 2'-O-methyl modified nucleoside
  modified_base 19: mod_base = OTHER; note = 2'-O-methyl modified nucleoside with phosphorothioate linkage
  modified_base 20: mod_base = OTHER; note = 2'-O-methyl modified nucleoside with phosphorothioate linkage
  modified_base 21: mod_base = OTHER; note = 2'-O-methyl modified nucleoside
ctagatattgggagaaacatt

SEQ ID NO: 2481 - RNA, 21 nt, synthetic construct
  source 1..21: mol_type = other RNA
  modified_base 1: mod_base = OTHER; note = 2'-O-methyl modified nucleoside with phosphorothioate linkage
  modified_base 2: mod_base = OTHER; note = 2'-O-methyl modified nucleoside
  modified_base 3: mod_base = OTHER; note = 2'-O-methyl modified nucleoside
  modified_base 4: mod_base = OTHER; note = 2'-O-methyl modified nucleoside
  modified_base 5: mod_base = OTHER; note = 2'-O-methyl modified nucleoside
  modified_base 6: mod_base = OTHER; note = 2'-O-methyl modified nucleoside
  modified_base 7: mod_base = OTHER; note = 2'-O-methyl modified nucleoside
  modified_base 8: mod_base = OTHER; note = 2'-fluoro modified nucleoside
  modified_base 9: mod_base = OTHER; note = 2'-fluoro modified nucleoside
  modified_base 10: mod_base = OTHER; note = 2'-fluoro modified nucleoside
  modified_base 11: mod_base = OTHER; note = 2'-fluoro modified nucleoside
  modified_base 12: mod_base = OTHER; note = 2'-O-methyl modified nucleoside
  modified_base 13: mod_base = OTHER; note = 2'-O-methyl modified nucleoside
  modified_base 14: mod_base = OTHER; note = 2'-O-methyl modified nucleoside
  modified_base 15: mod_base = OTHER; note = 2'-O-methyl modified nucleoside
  modified_base 16: mod_base = OTHER; note = 2'-O-methyl modified nucleoside
  modified_base 17: mod_base = OTHER; note = 2'-O-methyl modified nucleoside
  modified_base 18: mod_base = OTHER; note = 2'-O-methyl modified nucleoside
  modified_base 19: mod_base = OTHER; note = 2'-O-methyl modified nucleoside with phosphorothioate linkage
  modified_base 20: mod_base = OTHER; note = 2'-O-methyl modified nucleoside with phosphorothioate linkage
  modified_base 21: mod_base = OTHER; note = 2'-O-methyl modified nucleoside
cattggatcttctcattgatt

SEQ ID NO: 2482 - RNA, 21 nt, synthetic construct
  source 1..21: mol_type = other RNA
  modified_base 1: mod_base = OTHER; note = 2'-O-methyl modified nucleoside with phosphorothioate linkage
  modified_base 2: mod_base = OTHER; note = 2'-O-methyl modified nucleoside
  modified_base 3: mod_base = OTHER; note = 2'-O-methyl modified nucleoside
  modified_base 4: mod_base = OTHER; note = 2'-O-methyl modified nucleoside
  modified_base 5: mod_base = OTHER; note = 2'-O-methyl modified nucleoside
  modified_base 6: mod_base = OTHER; note = 2'-fluoro modified nucleoside
  modified_base 7: mod_base = OTHER; note = 2'-fluoro modified nucleoside
  modified_base 8: mod_base = OTHER; note = 2'-fluoro modified nucleoside
  modified_base 9: mod_base = OTHER; note = 2'-fluoro modified nucleoside
  modified_base 10: mod_base = OTHER; note = 2'-fluoro modified nucleoside
  modified_base 11: mod_base = OTHER; note = 2'-O-methyl modified nucleoside
  modified_base 12: mod_base = OTHER; note = 2'-O-methyl modified nucleoside
  modified_base 13: mod_base = OTHER; note = 2'-O-methyl modified nucleoside
  modified_base 14: mod_base = OTHER; note = 2'-O-methyl modified nucleoside
  modified_base 15: mod_base = OTHER; note = 2'-O-methyl modified nucleoside
  modified_base 16: mod_base = OTHER; note = 2'-O-methyl modified nucleoside
  modified_base 17: mod_base = OTHER; note = 2'-O-methyl modified nucleoside
  modified_base 18: mod_base = OTHER; note = 2'-O-methyl modified nucleoside
  modified_base 19: mod_base = OTHER; note = 2'-O-methyl modified nucleoside with phosphorothioate linkage
  modified_base 20: mod_base = OTHER; note = 2'-O-methyl modified nucleoside with phosphorothioate linkage
  modified_base 21: mod_base = OTHER; note = 2'-O-methyl modified nucleoside
ttggatcttctcattggaatt

SEQ ID NO: 2483 - DNA, 21 bp, synthetic construct
  source 1..21: mol_type = other DNA
  modified_base 1: mod_base = OTHER; note = 2'-O-methyl modified nucleoside with phosphorothioate linkage
  modified_base 2: mod_base = OTHER; note = 2'-O-methyl modified nucleoside
  modified_base 3: mod_base = OTHER; note = 2'-O-methyl modified nucleoside
  modified_base 4: mod_base = OTHER; note = 2'-O-methyl modified nucleoside
  modified_base 5: mod_base = OTHER; note = 2'-fluoro modified nucleoside
  modified_base 6: mod_base = OTHER; note = 2'-O-methyl modified nucleoside
  modified_base 7: mod_base = OTHER; note = 2'-fluoro modified nucleoside
  modified_base 8: mod_base = OTHER; note = 2'-fluoro modified nucleoside
  modified_base 10: mod_base = OTHER; note = 2'-O-methyl modified nucleoside
  modified_base 11: mod_base = OTHER; note = 2'-O-methyl modified nucleoside
  modified_base 12: mod_base = OTHER; note = 2'-O-methyl modified nucleoside
  modified_base 13: mod_base = OTHER; note = 2'-O-methyl modified nucleoside
  modified_base 14: mod_base = OTHER; note = 2'-O-methyl modified nucleoside
  modified_base 15: mod_base = OTHER; note = 2'-O-methyl modified nucleoside
  modified_base 16: mod_base = OTHER; note = 2'-O-methyl modified nucleoside
  modified_base 17: mod_base = OTHER; note = 2'-O-methyl modified nucleoside
  modified_base 18: mod_base = OTHER; note = 2'-O-methyl modified nucleoside
  modified_base 19: mod_base = OTHER; note = 2'-O-methyl modified nucleoside with phosphorothioate linkage
  modified_base 20: mod_base = OTHER; note = 2'-O-methyl modified nucleoside with phosphorothioate linkage
  modified_base 21: mod_base = OTHER; note = 2'-O-methyl modified nucleoside
  misc_feature 1..8: note = RNA
  misc_feature 9: note = DNA
  misc_feature 10..21: note = RNA
atacagagtggtgttacgatt

SEQ ID NO: 2484 - RNA, 21 nt, synthetic construct
  source 1..21: mol_type = other RNA
  modified_base 1: mod_base = OTHER; note = 2'-O-methyl modified nucleoside with phosphorothioate linkage
  modified_base 2: mod_base = OTHER; note = 2'-O-methyl modified nucleoside
  modified_base 3: mod_base = OTHER; note = 2'-O-methyl modified nucleoside
  modified_base 4: mod_base = OTHER; note = 2'-O-methyl modified nucleoside
  modified_base 5: mod_base = OTHER; note = 2'-O-methyl modified nucleoside
  modified_base 6: mod_base = OTHER; note = 2'-fluoro modified nucleoside
  modified_base 7: mod_base = OTHER; note = 2'-fluoro modified nucleoside
  modified_base 8: mod_base = OTHER; note = 2'-fluoro modified nucleoside
  modified_base 9: mod_base = OTHER; note = 2'-fluoro modified nucleoside
  modified_base 10: mod_base = OTHER; note = 2'-O-methyl modified nucleoside
  modified_base 11: mod_base = OTHER; note = 2'-O-methyl modified nucleoside
  modified_base 12: mod_base = OTHER; note = 2'-O-methyl modified nucleoside
  modified_base 13: mod_base = OTHER; note = 2'-O-methyl modified nucleoside
  modified_base 14: mod_base = OTHER; note = 2'-O-methyl modified nucleoside
  modified_base 15: mod_base = OTHER; note = 2'-O-methyl modified nucleoside
  modified_base 16: mod_base = OTHER; note = 2'-O-methyl modified nucleoside
  modified_base 17: mod_base = OTHER; note = 2'-O-methyl modified nucleoside
  modified_base 18: mod_base = OTHER; note = 2'-O-methyl modified nucleoside
  modified_base 19: mod_base = OTHER; note = 2'-O-methyl modified nucleoside with phosphorothioate linkage
  modified_base 20: mod_base = OTHER; note = 2'-O-methyl modified nucleoside with phosphorothioate linkage
  modified_base 21: mod_base = OTHER; note = 2'-O-methyl modified nucleoside
agtttaaagttgcctaagatt

SEQ ID NO: 2485 - RNA, 21 nt, synthetic construct
  source 1..21: mol_type = other RNA
  modified_base 1: mod_base = OTHER; note = 2'-O-methyl modified nucleoside with phosphorothioate linkage
  modified_base 2: mod_base = OTHER; note = 2'-O-methyl modified nucleoside
  modified_base 3: mod_base = OTHER; note = 2'-O-methyl modified nucleoside
  modified_base 4: mod_base = OTHER; note = 2'-O-methyl modified nucleoside
  modified_base 5: mod_base = OTHER; note = 2'-O-methyl modified nucleoside
  modified_base 6: mod_base = OTHER; note = 2'-O-methyl modified nucleoside
  modified_base 7: mod_base = OTHER; note = 2'-O-methyl modified nucleoside
  modified_base 8: mod_base = OTHER; note = 2'-fluoro modified nucleoside
  modified_base 9: mod_base = OTHER; note = 2'-fluoro modified nucleoside
  modified_base 10: mod_base = OTHER; note = 2'-O-methyl modified nucleoside
  modified_base 11: mod_base = OTHER; note = 2'-fluoro modified nucleoside
  modified_base 12: mod_base = OTHER; note = 2'-O-methyl modified nucleoside
  modified_base 13: mod_base = OTHER; note = 2'-O-methyl modified nucleoside
  modified_base 14: mod_base = OTHER; note = 2'-O-methyl modified nucleoside
  modified_base 15: mod_base = OTHER; note = 2'-O-methyl modified nucleoside
  modified_base 16: mod_base = OTHER; note = 2'-O-methyl modified nucleoside
  modified_base 17: mod_base = OTHER; note = 2'-O-methyl modified nucleoside
  modified_base 18: mod_base = OTHER; note = 2'-O-methyl modified nucleoside
  modified_base 19: mod_base = OTHER; note = 2'-O-methyl modified nucleoside with phosphorothioate linkage
  modified_base 20: mod_base = OTHER; note = 2'-O-methyl modified nucleoside with phosphorothioate linkage
  modified_base 21: mod_base = OTHER; note = 2'-O-methyl modified nucleoside
tttaaagttgcctaagaaatt

SEQ ID NO: 2486 - RNA, 21 nt, synthetic construct
  source 1..21: mol_type = other RNA
  modified_base 1: mod_base = OTHER; note = 2'-O-methyl modified nucleoside with phosphorothioate linkage
  modified_base 2: mod_base = OTHER; note = 2'-O-methyl modified nucleoside
  modified_base 3: mod_base = OTHER; note = 2'-O-methyl modified nucleoside
  modified_base 4: mod_base = OTHER; note = 2'-O-methyl modified nucleoside
  modified_base 5: mod_base = OTHER; note = 2'-fluoro modified nucleoside
  modified_base 6: mod_base = OTHER; note = 2'-fluoro modified nucleoside
  modified_base 7: mod_base = OTHER; note = 2'-O-methyl modified nucleoside
  modified_base 8: mod_base = OTHER; note = 2'-fluoro modified nucleoside
  modified_base 9: mod_base = OTHER; note = 2'-fluoro modified nucleoside
  modified_base 10: mod_base = OTHER; note = 2'-O-methyl modified nucleoside
  modified_base 11: mod_base = OTHER; note = 2'-fluoro modified nucleoside
  modified_base 12: mod_base = OTHER; note = 2'-O-methyl modified nucleoside
  modified_base 13: mod_base = OTHER; note = 2'-O-methyl modified nucleoside
  modified_base 14: mod_base = OTHER; note = 2'-O-methyl modified nucleoside
  modified_base 15: mod_base = OTHER; note = 2'-O-methyl modified nucleoside
  modified_base 16: mod_base = OTHER; note = 2'-O-methyl modified nucleoside
  modified_base 17: mod_base = OTHER; note = 2'-O-methyl modified nucleoside
  modified_base 18: mod_base = OTHER; note = 2'-O-methyl modified nucleoside
  modified_base 19: mod_base = OTHER; note = 2'-O-methyl modified nucleoside with phosphorothioate linkage
  modified_base 20: mod_base = OTHER; note = 2'-O-methyl modified nucleoside with phosphorothioate linkage
  modified_base 21: mod_base = OTHER; note = 2'-O-methyl modified nucleoside
tggattgctttttagcaaatt

SEQ ID NO: 2487 - DNA, 21 bp, synthetic construct
  source 1..21: mol_type = other DNA
  modified_base 1: mod_base = OTHER; note = 2'-O-methyl modified nucleoside with phosphorothioate linkage
  modified_base 2: mod_base = OTHER; note = 2'-O-methyl modified nucleoside
  modified_base 3: mod_base = OTHER; note = 2'-O-methyl modified nucleoside
  modified_base 4: mod_base = OTHER; note = 2'-O-methyl modified nucleoside
  modified_base 5: mod_base = OTHER; note = 2'-fluoro modified nucleoside
  modified_base 6: mod_base = OTHER; note = 2'-O-methyl modified nucleoside
  modified_base 7: mod_base = OTHER; note = 2'-fluoro modified nucleoside
  modified_base 8: mod_base = OTHER; note = 2'-fluoro modified nucleoside
  modified_base 10: mod_base = OTHER; note = 2'-O-methyl modified nucleoside
  modified_base 11: mod_base = OTHER; note = 2'-O-methyl modified nucleoside
  modified_base 12: mod_base = OTHER; note = 2'-O-methyl modified nucleoside
  modified_base 13: mod_base = OTHER; note = 2'-O-methyl modified nucleoside
  modified_base 14: mod_base = OTHER; note = 2'-O-methyl modified nucleoside
  modified_base 15: mod_base = OTHER; note = 2'-O-methyl modified nucleoside
  modified_base 16: mod_base = OTHER; note = 2'-O-methyl modified nucleoside
  modified_base 17: mod_base = OTHER; note = 2'-O-methyl modified nucleoside
  modified_base 18: mod_base = OTHER; note = 2'-O-methyl modified nucleoside
  modified_base 19: mod_base = OTHER; note = 2'-O-methyl modified nucleoside with phosphorothioate linkage
  modified_base 20: mod_base = OTHER; note = 2'-O-methyl modified nucleoside with phosphorothioate linkage
  modified_base 21: mod_base = OTHER; note = 2'-O-methyl modified nucleoside
  misc_feature 1..8: note = RNA
  misc_feature 9: note = DNA
  misc_feature 10..21: note = RNA
aaataaagttctcttagcatt

SEQ ID NO: 2488 - RNA, 21 nt, synthetic construct
  source 1..21: mol_type = other RNA
  modified_base 1: mod_base = OTHER; note = 2'-O-methyl modified nucleoside with phosphorothioate linkage
  modified_base 2: mod_base = OTHER; note = 2'-fluoro modified nucleoside with phosphorothioate linkage
  modified_base 3: mod_base = OTHER; note = 2'-O-methyl modified nucleoside
  modified_base 4: mod_base = OTHER; note = 2'-fluoro modified nucleoside
  modified_base 5: mod_base = OTHER; note = 2'-O-methyl modified nucleoside
  modified_base 6: mod_base = OTHER; note = 2'-fluoro modified nucleoside
  modified_base 7: mod_base = OTHER; note = 2'-O-methyl modified nucleoside
  modified_base 8: mod_base = OTHER; note = 2'-fluoro modified nucleoside
  modified_base 9: mod_base = OTHER; note = 2'-O-methyl modified nucleoside
  modified_base 10: mod_base = OTHER; note = 2'-fluoro modified nucleoside
  modified_base 11: mod_base = OTHER; note = 2'-O-methyl modified nucleoside
  modified_base 12: mod_base = OTHER; note = 2'-fluoro modified nucleoside
  modified_base 13: mod_base = OTHER; note = 2'-O-methyl modified nucleoside
  modified_base 14: mod_base = OTHER; note = 2'-fluoro modified nucleoside
  modified_base 15: mod_base = OTHER; note = 2'-O-methyl modified nucleoside
  modified_base 16: mod_base = OTHER; note = 2'-fluoro modified nucleoside
  modified_base 17: mod_base = OTHER; note = 2'-O-methyl modified nucleoside
  modified_base 18: mod_base = OTHER; note = 2'-fluoro modified nucleoside
  modified_base 19: mod_base = OTHER; note = 2'-O-methyl modified nucleoside with phosphorothioate linkage
  modified_base 20: mod_base = OTHER; note = 2'-O-methyl modified nucleoside with phosphorothioate linkage
  modified_base 21: mod_base = OTHER; note = 2'-O-methyl modified nucleoside
tggaagtacagagtttgtatt

SEQ ID NO: 2489 - RNA, 21 nt, synthetic construct
  source 1..21: mol_type = other RNA
  modified_base 1: mod_base = OTHER; note = 2'-O-methyl modified nucleoside with phosphorothioate linkage
  modified_base 2: mod_base = OTHER; note = 2'-fluoro modified nucleoside with phosphorothioate linkage
  modified_base 3: mod_base = OTHER; note = 2'-O-methyl modified nucleoside
  modified_base 4: mod_base = OTHER; note = 2'-fluoro modified nucleoside
  modified_base 5: mod_base = OTHER; note = 2'-O-methyl modified nucleoside
  modified_base 6: mod_base = OTHER; note = 2'-fluoro modified nucleoside
  modified_base 7: mod_base = OTHER; note = 2'-O-methyl modified nucleoside
  modified_base 8: mod_base = OTHER; note = 2'-fluoro modified nucleoside
  modified_base 9: mod_base = OTHER; note = 2'-O-methyl modified nucleoside
  modified_base 10: mod_base = OTHER; note = 2'-fluoro modified nucleoside
  modified_base 11: mod_base = OTHER; note = 2'-O-methyl modified nucleoside
  modified_base 12: mod_base = OTHER; note = 2'-fluoro modified nucleoside
  modified_base 13: mod_base = OTHER; note = 2'-O-methyl modified nucleoside
  modified_base 14: mod_base = OTHER; note = 2'-fluoro modified nucleoside
  modified_base 15: mod_base = OTHER; note = 2'-O-methyl modified nucleoside
  modified_base 16: mod_base = OTHER; note = 2'-fluoro modified nucleoside
  modified_base 17: mod_base = OTHER; note = 2'-O-methyl modified nucleoside
  modified_base 18: mod_base = OTHER; note = 2'-fluoro modified nucleoside
  modified_base 19: mod_base = OTHER; note = 2'-O-methyl modified nucleoside with phosphorothioate linkage
  modified_base 20: mod_base = OTHER; note = 2'-O-methyl modified nucleoside with phosphorothioate linkage
  modified_base 21: mod_base = OTHER; note = 2'-O-methyl modified nucleoside
ttcgattccaggaagtacatt

SEQ ID NO: 2490 - RNA, 21 nt, synthetic construct
  source 1..21: mol_type = other RNA
  modified_base 1: mod_base = OTHER; note = 2'-O-methyl modified nucleoside with phosphorothioate linkage
  modified_base 2: mod_base = OTHER; note = 2'-fluoro modified nucleoside with phosphorothioate linkage
  modified_base 3: mod_base = OTHER; note = 2'-O-methyl modified nucleoside
  modified_base 4: mod_base = OTHER; note = 2'-fluoro modified nucleoside
  modified_base 5: mod_base = OTHER; note = 2'-O-methyl modified nucleoside
  modified_base 6: mod_base = OTHER; note = 2'-fluoro modified nucleoside
  modified_base 7: mod_base = OTHER; note = 2'-O-methyl modified nucleoside
  modified_base 8: mod_base = OTHER; note = 2'-fluoro modified nucleoside
  modified_base 9: mod_base = OTHER; note = 2'-O-methyl modified nucleoside
  modified_base 10: mod_base = OTHER; note = 2'-fluoro modified nucleoside
  modified_base 11: mod_base = OTHER; note = 2'-O-methyl modified nucleoside
  modified_base 12: mod_base = OTHER; note = 2'-fluoro modified nucleoside
  modified_base 13: mod_base = OTHER; note = 2'-O-methyl modified nucleoside
  modified_base 14: mod_base = OTHER; note = 2'-fluoro modified nucleoside
  modified_base 15: mod_base = OTHER; note = 2'-O-methyl modified nucleoside
  modified_base 16: mod_base = OTHER; note = 2'-fluoro modified nucleoside
  modified_base 17: mod_base = OTHER; note = 2'-O-methyl modified nucleoside
  modified_base 18: mod_base = OTHER; note = 2'-fluoro modified nucleoside
  modified_base 19: mod_base = OTHER; note = 2'-O-methyl modified nucleoside with phosphorothioate linkage
  modified_base 20: mod_base = OTHER; note = 2'-O-methyl modified nucleoside with phosphorothioate linkage
  modified_base 21: mod_base = OTHER; note = 2'-O-methyl modified nucleoside
ttatcgattccaggaagtatt

SEQ ID NO: 2491 - RNA, 21 nt, synthetic construct
  source 1..21: mol_type = other RNA
  modified_base 1: mod_base = OTHER; note = 2'-O-methyl modified nucleoside with phosphorothioate linkage
  modified_base 2: mod_base = OTHER; note = 2'-fluoro modified nucleoside with phosphorothioate linkage
  modified_base 3: mod_base = OTHER; note = 2'-O-methyl modified nucleoside
  modified_base 4: mod_base = OTHER; note = 2'-fluoro modified nucleoside
  modified_base 5: mod_base = OTHER; note = 2'-O-methyl modified nucleoside
  modified_base 6: mod_base = OTHER; note = 2'-fluoro modified nucleoside
  modified_base 7: mod_base = OTHER; note = 2'-O-methyl modified nucleoside
  modified_base 8: mod_base = OTHER; note = 2'-fluoro modified nucleoside
  modified_base 9: mod_base = OTHER; note = 2'-O-methyl modified nucleoside
  modified_base 10: mod_base = OTHER; note = 2'-fluoro modified nucleoside
  modified_base 11: mod_base = OTHER; note = 2'-O-methyl modified nucleoside
  modified_base 12: mod_base = OTHER; note = 2'-fluoro modified nucleoside
  modified_base 13: mod_base = OTHER; note = 2'-O-methyl modified nucleoside
  modified_base 14: mod_base = OTHER; note = 2'-fluoro modified nucleoside
  modified_base 15: mod_base = OTHER; note = 2'-O-methyl modified nucleoside
  modified_base 16: mod_base = OTHER; note = 2'-fluoro modified nucleoside
  modified_base 17: mod_base = OTHER; note = 2'-O-methyl modified nucleoside
  modified_base 18: mod_base = OTHER; note = 2'-fluoro modified nucleoside
  modified_base 19: mod_base = OTHER; note = 2'-O-methyl modified nucleoside with phosphorothioate linkage
  modified_base 20: mod_base = OTHER; note = 2'-O-methyl modified nucleoside with phosphorothioate linkage
  modified_base 21: mod_base = OTHER; note = 2'-O-methyl modified nucleoside
taaatacaagtatcgattctt

SEQ ID NO: 2492 - RNA, 21 nt, synthetic construct
  source 1..21: mol_type = other RNA
  modified_base 1: mod_base = OTHER; note = 2'-O-methyl modified nucleoside with phosphorothioate linkage
  modified_base 2: mod_base = OTHER; note = 2'-fluoro modified nucleoside with phosphorothioate linkage
  modified_base 3: mod_base = OTHER; note = 2'-O-methyl modified nucleoside
  modified_base 4: mod_base = OTHER; note = 2'-fluoro modified nucleoside
  modified_base 5: mod_base = OTHER; note = 2'-O-methyl modified nucleoside
  modified_base 6: mod_base = OTHER; note = 2'-fluoro modified nucleoside
  modified_base 7: mod_base = OTHER; note = 2'-O-methyl modified nucleoside
  modified_base 8: mod_base = OTHER; note = 2'-fluoro modified nucleoside
  modified_base 9: mod_base = OTHER; note = 2'-O-methyl modified nucleoside
  modified_base 10: mod_base = OTHER; note = 2'-fluoro modified nucleoside
  modified_base 11: mod_base = OTHER; note = 2'-O-methyl modified nucleoside
  modified_base 12: mod_base = OTHER; note = 2'-fluoro modified nucleoside
  modified_base 13: mod_base = OTHER; note = 2'-O-methyl modified nucleoside
  modified_base 14: mod_base = OTHER; note = 2'-fluoro modified nucleoside
  modified_base 15: mod_base = OTHER; note = 2'-O-methyl modified nucleoside
  modified_base 16: mod_base = OTHER; note = 2'-fluoro modified nucleoside
  modified_base 17: mod_base = OTHER; note = 2'-O-methyl modified nucleoside
  modified_base 18: mod_base = OTHER; note = 2'-fluoro modified nucleoside
  modified_base 19: mod_base = OTHER; note = 2'-O-methyl modified nucleoside with phosphorothioate linkage
  modified_base 20: mod_base = OTHER; note = 2'-O-methyl modified nucleoside with phosphorothioate linkage
  modified_base 21: mod_base = OTHER; note = 2'-O-methyl modified nucleoside
tcgtaacttggtactagaatt

SEQ ID NO: 2493 - RNA, 21 nt, synthetic construct
  source 1..21: mol_type = other RNA
  modified_base 1: mod_base = OTHER; note = 2'-O-methyl modified nucleoside with phosphorothioate linkage
  modified_base 2: mod_base = OTHER; note = 2'-fluoro modified nucleoside with phosphorothioate linkage
  modified_base 3: mod_base = OTHER; note = 2'-O-methyl modified nucleoside
  modified_base 4: mod_base = OTHER; note = 2'-fluoro modified nucleoside
  modified_base 5: mod_base = OTHER; note = 2'-O-methyl modified nucleoside
  modified_base 6: mod_base = OTHER; note = 2'-fluoro modified nucleoside
  modified_base 7: mod_base = OTHER; note = 2'-O-methyl modified nucleoside
  modified_base 8: mod_base = OTHER; note = 2'-fluoro modified nucleoside
  modified_base 9: mod_base = OTHER; note = 2'-O-methyl modified nucleoside
  modified_base 10: mod_base = OTHER; note = 2'-fluoro modified nucleoside
  modified_base 11: mod_base = OTHER; note = 2'-O-methyl modified nucleoside
  modified_base 12: mod_base = OTHER; note = 2'-fluoro modified nucleoside
  modified_base 13: mod_base = OTHER; note = 2'-O-methyl modified nucleoside
  modified_base 14: mod_base = OTHER; note = 2'-fluoro modified nucleoside
  modified_base 15: mod_base = OTHER; note = 2'-O-methyl modified nucleoside
  modified_base 16: mod_base = OTHER; note = 2'-fluoro modified nucleoside
  modified_base 17: mod_base = OTHER; note = 2'-O-methyl modified nucleoside
  modified_base 18: mod_base = OTHER; note = 2'-fluoro modified nucleoside
  modified_base 19: mod_base = OTHER; note = 2'-O-methyl modified nucleoside with phosphorothioate linkage
  modified_base 20: mod_base = OTHER; note = 2'-O-methyl modified nucleoside with phosphorothioate linkage
  modified_base 21: mod_base = OTHER; note = 2'-O-methyl modified nucleoside
taatttggtgcacgtaacttt

SEQ ID NO: 2494 - RNA, 21 nt, synthetic construct
  source 1..21: mol_type = other RNA
  modified_base 1: mod_base = OTHER; note = 2'-O-methyl modified nucleoside with phosphorothioate linkage
  modified_base 2: mod_base = OTHER; note = 2'-fluoro modified nucleoside with phosphorothioate linkage
  modified_base 3: mod_base = OTHER; note = 2'-O-methyl modified nucleoside
  modified_base 4: mod_base = OTHER; note = 2'-fluoro modified nucleoside
  modified_base 5: mod_base = OTHER; note = 2'-O-methyl modified nucleoside
  modified_base 6: mod_base = OTHER; note = 2'-fluoro modified nucleoside
  modified_base 7: mod_base = OTHER; note = 2'-O-methyl modified nucleoside
  modified_base 8: mod_base = OTHER; note = 2'-fluoro modified nucleoside
  modified_base 9: mod_base = OTHER; note = 2'-O-methyl modified nucleoside
  modified_base 10: mod_base = OTHER; note = 2'-fluoro modified nucleoside
  modified_base 11: mod_base = OTHER; note = 2'-O-methyl modified nucleoside
  modified_base 12: mod_base = OTHER; note = 2'-fluoro modified nucleoside
  modified_base 13: mod_base = OTHER; note = 2'-O-methyl modified nucleoside
  modified_base 14: mod_base = OTHER; note = 2'-fluoro modified nucleoside
  modified_base 15: mod_base = OTHER; note = 2'-O-methyl modified nucleoside
  modified_base 16: mod_base = OTHER; note = 2'-fluoro modified nucleoside
  modified_base 17: mod_base = OTHER; note = 2'-O-methyl modified nucleoside
  modified_base 18: mod_base = OTHER; note = 2'-fluoro modified nucleoside
  modified_base 19: mod_base = OTHER; note = 2'-O-methyl modified nucleoside with phosphorothioate linkage
  modified_base 20: mod_base = OTHER; note = 2'-O-methyl modified nucleoside with phosphorothioate linkage
  modified_base 21: mod_base = OTHER; note = 2'-O-methyl modified nucleoside
tataatttggtgcacgtaatt

SEQ ID NO: 2495 - RNA, 21 nt, synthetic construct
  source 1..21: mol_type = other RNA
  modified_base 1: mod_base = OTHER; note = 2'-O-methyl modified nucleoside with phosphorothioate linkage
  modified_base 2: mod_base = OTHER; note = 2'-fluoro modified nucleoside with phosphorothioate linkage
  modified_base 3: mod_base = OTHER; note = 2'-O-methyl modified nucleoside
  modified_base 4: mod_base = OTHER; note = 2'-fluoro modified nucleoside
  modified_base 5: mod_base = OTHER; note = 2'-O-methyl modified nucleoside
  modified_base 6: mod_base = OTHER; note = 2'-fluoro modified nucleoside
  modified_base 7: mod_base = OTHER; note = 2'-O-methyl modified nucleoside
  modified_base 8: mod_base = OTHER; note = 2'-fluoro modified nucleoside
  modified_base 9: mod_base = OTHER; note = 2'-O-methyl modified nucleoside
  modified_base 10: mod_base = OTHER; note = 2'-fluoro modified nucleoside
  modified_base 11: mod_base = OTHER; note = 2'-O-methyl modified nucleoside
  modified_base 12: mod_base = OTHER; note = 2'-fluoro modified nucleoside
  modified_base 13: mod_base = OTHER; note = 2'-O-methyl modified nucleoside
  modified_base 14: mod_base = OTHER; note = 2'-fluoro modified nucleoside
  modified_base 15: mod_base = OTHER; note = 2'-O-methyl modified nucleoside
  modified_base 16: mod_base = OTHER; note = 2'-fluoro modified nucleoside
  modified_base 17: mod_base = OTHER; note = 2'-O-methyl modified nucleoside
  modified_base 18: mod_base = OTHER; note = 2'-fluoro modified nucleoside
  modified_base 19: mod_base = OTHER; note = 2'-O-methyl modified nucleoside with phosphorothioate linkage
  modified_base 20: mod_base = OTHER; note = 2'-O-methyl modified nucleoside with phosphorothioate linkage
  modified_base 21: mod_base = OTHER; note = 2'-O-methyl modified nucleoside
tgactttttagtagatttttt

SEQ ID NO: 2496 - RNA, 21 nt, synthetic construct
  source 1..21: mol_type = other RNA
  modified_base 1: mod_base = OTHER; note = 2'-O-methyl modified nucleoside with phosphorothioate linkage
  modified_base 2: mod_base = OTHER; note = 2'-fluoro modified nucleoside with phosphorothioate linkage
  modified_base 3: mod_base = OTHER; note = 2'-O-methyl modified nucleoside
  modified_base 4: mod_base = OTHER; note = 2'-fluoro modified nucleoside
  modified_base 5: mod_base = OTHER; note = 2'-O-methyl modified nucleoside
  modified_base 6: mod_base = OTHER; note = 2'-fluoro modified nucleoside
  modified_base 7: mod_base = OTHER; note = 2'-O-methyl modified nucleoside
  modified_base 8: mod_base = OTHER; note = 2'-fluoro modified nucleoside
  modified_base 9: mod_base = OTHER; note = 2'-O-methyl modified nucleoside
  modified_base 10: mod_base = OTHER; note = 2'-fluoro modified nucleoside
  modified_base 11: mod_base = OTHER; note = 2'-O-methyl modified nucleoside
  modified_base 12: mod_base = OTHER; note = 2'-fluoro modified nucleoside
  modified_base 13: mod_base = OTHER; note = 2'-O-methyl modified nucleoside
  modified_base 14: mod_base = OTHER; note = 2'-fluoro modified nucleoside
  modified_base 15: mod_base = OTHER; note = 2'-O-methyl modified nucleoside
  modified_base 16: mod_base = OTHER; note = 2'-fluoro modified nucleoside
  modified_base 17: mod_base = OTHER; note = 2'-O-methyl modified nucleoside
  modified_base 18: mod_base = OTHER; note = 2'-fluoro modified nucleoside
  modified_base 19: mod_base = OTHER; note = 2'-O-methyl modified nucleoside with phosphorothioate linkage
  modified_base 20: mod_base = OTHER; note = 2'-O-methyl modified nucleoside with phosphorothioate linkage
  modified_base 21: mod_base = OTHER; note = 2'-O-methyl modified nucleoside
tagagactttttagtagattt

SEQ ID NO: 2497 - RNA, 21 nt, synthetic construct
  source 1..21: mol_type = other RNA
  modified_base 1: mod_base = OTHER; note = 2'-O-methyl modified nucleoside with phosphorothioate linkage
  modified_base 2: mod_base = OTHER; note = 2'-fluoro modified nucleoside with phosphorothioate linkage
  modified_base 3: mod_base = OTHER; note = 2'-O-methyl modified nucleoside
  modified_base 4: mod_base = OTHER; note = 2'-fluoro modified nucleoside
  modified_base 5: mod_base = OTHER; note = 2'-O-methyl modified nucleoside
  modified_base 6: mod_base = OTHER; note = 2'-fluoro modified nucleoside
  modified_base 7: mod_base = OTHER; note = 2'-O-methyl modified nucleoside
  modified_base 8: mod_base = OTHER; note = 2'-fluoro modified nucleoside
  modified_base 9: mod_base = OTHER; note = 2'-O-methyl modified nucleoside
  modified_base 10: mod_base = OTHER; note = 2'-fluoro modified nucleoside
  modified_base 11: mod_base = OTHER; note = 2'-O-methyl modified nucleoside
  modified_base 12: mod_base = OTHER; note = 2'-fluoro modified nucleoside
  modified_base 13: mod_base = OTHER; note = 2'-O-methyl modified nucleoside
  modified_base 14: mod_base = OTHER; note = 2'-fluoro modified nucleoside
  modified_base 15: mod_base = OTHER; note = 2'-O-methyl modified nucleoside
  modified_base 16: mod_base = OTHER; note = 2'-fluoro modified nucleoside
  modified_base 17: mod_base = OTHER; note = 2'-O-methyl modified nucleoside
  modified_base 18: mod_base = OTHER; note = 2'-fluoro modified nucleoside
  modified_base 19: mod_base = OTHER; note = 2'-O-methyl modified nucleoside with phosphorothioate linkage
  modified_base 20: mod_base = OTHER; note = 2'-O-methyl modified nucleoside with phosphorothioate linkage
  modified_base 21: mod_base = OTHER; note = 2'-O-methyl modified nucleoside
tgtttctcccaatatctagtt

SEQ ID NO: 2498 - RNA, 21 nt, synthetic construct
  source 1..21: mol_type = other RNA
  modified_base 1: mod_base = OTHER; note = 2'-O-methyl modified nucleoside with phosphorothioate linkage
  modified_base 2: mod_base = OTHER; note = 2'-fluoro modified nucleoside with phosphorothioate linkage
  modified_base 3: mod_base = OTHER; note = 2'-O-methyl modified nucleoside
  modified_base 4: mod_base = OTHER; note = 2'-fluoro modified nucleoside
  modified_base 5: mod_base = OTHER; note = 2'-O-methyl modified nucleoside
  modified_base 6: mod_base = OTHER; note = 2'-fluoro modified nucleoside
  modified_base 7: mod_base = OTHER; note = 2'-O-methyl modified nucleoside
  modified_base 8: mod_base = OTHER; note = 2'-fluoro modified nucleoside
  modified_base 9: mod_base = OTHER; note = 2'-O-methyl modified nucleoside
  modified_base 10: mod_base = OTHER; note = 2'-fluoro modified nucleoside
  modified_base 11: mod_base = OTHER; note = 2'-O-methyl modified nucleoside
  modified_base 12: mod_base = OTHER; note = 2'-fluoro modified nucleoside
  modified_base 13: mod_base = OTHER; note = 2'-O-methyl modified nucleoside
  modified_base 14: mod_base = OTHER; note = 2'-fluoro modified nucleoside
  modified_base 15: mod_base = OTHER; note = 2'-O-methyl modified nucleoside
  modified_base 16: mod_base = OTHER; note = 2'-fluoro modified nucleoside
  modified_base 17: mod_base = OTHER; note = 2'-O-methyl modified nucleoside
  modified_base 18: mod_base = OTHER; note = 2'-fluoro modified nucleoside
  modified_base 19: mod_base = OTHER; note = 2'-O-methyl modified nucleoside with phosphorothioate linkage
  modified_base 20: mod_base = OTHER; note = 2'-O-methyl modified nucleoside with phosphorothioate linkage
  modified_base 21: mod_base = OTHER; note = 2'-O-methyl modified nucleoside
tcaatgagaagatccaatgtt

SEQ ID NO: 2499 - RNA, 21 nt, synthetic construct
  source 1..21: mol_type = other RNA
  modified_base 1: mod_base = OTHER; note = 2'-O-methyl modified nucleoside with phosphorothioate linkage
  modified_base 2: mod_base = OTHER; note = 2'-fluoro modified nucleoside with phosphorothioate linkage
  modified_base 3: mod_base = OTHER; note = 2'-O-methyl modified nucleoside
  modified_base 4: mod_base = OTHER; note = 2'-fluoro modified nucleoside
  modified_base 5: mod_base = OTHER; note = 2'-O-methyl modified nucleoside
  modified_base 6: mod_base = OTHER; note = 2'-fluoro modified nucleoside
  modified_base 7: mod_base = OTHER; note = 2'-O-methyl modified nucleoside
  modified_base 8: mod_base = OTHER; note = 2'-fluoro modified nucleoside
  modified_base 9: mod_base = OTHER; note = 2'-O-methyl modified nucleoside
  modified_base 10: mod_base = OTHER; note = 2'-fluoro modified nucleoside
  modified_base 11: mod_base = OTHER; note = 2'-O-methyl modified nucleoside
  modified_base 12: mod_base = OTHER; note = 2'-fluoro modified nucleoside
  modified_base 13: mod_base = OTHER; note = 2'-O-methyl modified nucleoside
  modified_base 14: mod_base = OTHER; note = 2'-fluoro modified nucleoside
  modified_base 15: mod_base = OTHER; note = 2'-O-methyl modified nucleoside
  modified_base 16: mod_base = OTHER; note = 2'-fluoro modified nucleoside
  modified_base 17: mod_base = OTHER; note = 2'-O-methyl modified nucleoside
  modified_base 18: mod_base = OTHER; note = 2'-fluoro modified nucleoside
  modified_base 19: mod_base = OTHER; note = 2'-O-methyl modified nucleoside with phosphorothioate linkage
  modified_base 20: mod_base = OTHER; note = 2'-O-methyl modified nucleoside with phosphorothioate linkage
  modified_base 21: mod_base = OTHER; note = 2'-O-methyl modified nucleoside
ttccaatgagaagatccaatt

SEQ ID NO: 2500 - RNA, 21 nt, synthetic construct
  source 1..21: mol_type = other RNA
  modified_base 1: mod_base = OTHER; note = 2'-O-methyl modified nucleoside with phosphorothioate linkage
  modified_base 2: mod_base = OTHER; note = 2'-fluoro modified nucleoside with phosphorothioate linkage
  modified_base 3: mod_base = OTHER; note = 2'-O-methyl modified nucleoside
  modified_base 4: mod_base = OTHER; note = 2'-fluoro modified nucleoside
  modified_base 5: mod_base = OTHER; note = 2'-O-methyl modified nucleoside
  modified_base 6: mod_base = OTHER; note = 2'-fluoro modified nucleoside
  modified_base 7: mod_base = OTHER; note = 2'-O-methyl modified nucleoside
  modified_base 8: mod_base = OTHER; note = 2'-fluoro modified nucleoside
  modified_base 9: mod_base = OTHER; note = 2'-O-methyl modified nucleoside
  modified_base 10: mod_base = OTHER; note = 2'-fluoro modified nucleoside
  modified_base 11: mod_base = OTHER; note = 2'-O-methyl modified nucleoside
  modified_base 12: mod_base = OTHER; note = 2'-fluoro modified nucleoside
  modified_base 13: mod_base = OTHER; note = 2'-O-methyl modified nucleoside
  modified_base 14: mod_base = OTHER; note = 2'-fluoro modified nucleoside
  modified_base 15: mod_base = OTHER; note = 2'-O-methyl modified nucleoside
  modified_base 16: mod_base = OTHER; note = 2'-fluoro modified nucleoside
  modified_base 17: mod_base = OTHER; note = 2'-O-methyl modified nucleoside
  modified_base 18: mod_base = OTHER; note = 2'-fluoro modified nucleoside
  modified_base 19: mod_base = OTHER; note = 2'-O-methyl modified nucleoside with phosphorothioate linkage
  modified_base 20: mod_base = OTHER; note = 2'-O-methyl modified nucleoside with phosphorothioate linkage
  modified_base 21: mod_base = OTHER; note = 2'-O-methyl modified nucleoside
tcgtaacaccactctgtattt

SEQ ID NO: 2501 - RNA, 21 nt, synthetic construct
  source 1..21: mol_type = other RNA
  modified_base 1: mod_base = OTHER; note = 2'-O-methyl modified nucleoside with phosphorothioate linkage
  modified_base 2: mod_base = OTHER; note = 2'-fluoro modified nucleoside with phosphorothioate linkage
  modified_base 3: mod_base = OTHER; note = 2'-O-methyl modified nucleoside
  modified_base 4: mod_base = OTHER; note = 2'-fluoro modified nucleoside
  modified_base 5: mod_base = OTHER; note = 2'-O-methyl modified nucleoside
  modified_base 6: mod_base = OTHER; note = 2'-fluoro modified nucleoside
  modified_base 7: mod_base = OTHER; note = 2'-O-methyl modified nucleoside
  modified_base 8: mod_base = OTHER; note = 2'-fluoro modified nucleoside
  modified_base 9: mod_base = OTHER; note = 2'-O-methyl modified nucleoside
  modified_base 10: mod_base = OTHER; note = 2'-fluoro modified nucleoside
  modified_base 11: mod_base = OTHER; note = 2'-O-methyl modified nucleoside
  modified_base 12: mod_base = OTHER; note = 2'-fluoro modified nucleoside
  modified_base 13: mod_base = OTHER; note = 2'-O-methyl modified nucleoside
  modified_base 14: mod_base = OTHER; note = 2'-fluoro modified nucleoside
  modified_base 15: mod_base = OTHER; note = 2'-O-methyl modified nucleoside
  modified_base 16: mod_base = OTHER; note = 2'-fluoro modified nucleoside
  modified_base 17: mod_base = OTHER; note = 2'-O-methyl modified nucleoside
  modified_base 18: mod_base = OTHER; note = 2'-fluoro modified nucleoside
  modified_base 19: mod_base = OTHER; note = 2'-O-methyl modified nucleoside with phosphorothioate linkage
  modified_base 20: mod_base = OTHER; note = 2'-O-methyl modified nucleoside with phosphorothioate linkage
  modified_base 21: mod_base = OTHER; note = 2'-O-methyl modified nucleoside
tcttaggcaactttaaacttt

SEQ ID NO: 2502 - RNA, 21 nt, synthetic construct
  source 1..21: mol_type = other RNA
  modified_base 1: mod_base = OTHER; note = 2'-O-methyl modified nucleoside with phosphorothioate linkage
  modified_base 2: mod_base = OTHER; note = 2'-fluoro modified nucleoside with phosphorothioate linkage
  modified_base 3: mod_base = OTHER; note = 2'-O-methyl modified nucleoside
  modified_base 4: mod_base = OTHER; note = 2'-fluoro modified nucleoside
  modified_base 5: mod_base = OTHER; note = 2'-O-methyl modified nucleoside
  modified_base 6: mod_base = OTHER; note = 2'-fluoro modified nucleoside
  modified_base 7: mod_base = OTHER; note = 2'-O-methyl modified nucleoside
  modified_base 8: mod_base = OTHER; note = 2'-fluoro modified nucleoside
  modified_base 9: mod_base = OTHER; note = 2'-O-methyl modified nucleoside
  modified_base 10: mod_base = OTHER; note = 2'-fluoro modified nucleoside
  modified_base 11: mod_base = OTHER; note = 2'-O-methyl modified nucleoside
  modified_base 12: mod_base = OTHER; note = 2'-fluoro modified nucleoside
  modified_base 13: mod_base = OTHER; note = 2'-O-methyl modified nucleoside
  modified_base 14: mod_base = OTHER; note = 2'-fluoro modified nucleoside
  modified_base 15: mod_base = OTHER; note = 2'-O-methyl modified nucleoside
  modified_base 16: mod_base = OTHER; note = 2'-fluoro modified nucleoside
  modified_base 17: mod_base = OTHER; note = 2'-O-methyl modified nucleoside
  modified_base 18: mod_base = OTHER; note = 2'-fluoro modified nucleoside
  modified_base 19: mod_base = OTHER; note = 2'-O-methyl modified nucleoside with phosphorothioate linkage
  modified_base 20: mod_base = OTHER; note = 2'-O-methyl modified nucleoside with phosphorothioate linkage
  modified_base 21: mod_base = OTHER; note = 2'-O-methyl modified nucleoside
tttcttaggcaactttaaatt

SEQ ID NO: 2503 - RNA, 21 nt, synthetic construct
  source 1..21: mol_type = other RNA
  modified_base 1: mod_base = OTHER; note = 2'-O-methyl modified nucleoside with phosphorothioate linkage
  modified_base 2: mod_base = OTHER; note = 2'-fluoro modified nucleoside with phosphorothioate linkage
  modified_base 3: mod_base = OTHER; note = 2'-O-methyl modified nucleoside
  modified_base 4: mod_base = OTHER; note = 2'-fluoro modified nucleoside
  modified_base 5: mod_base = OTHER; note = 2'-O-methyl modified nucleoside
  modified_base 6: mod_base = OTHER; note = 2'-fluoro modified nucleoside
  modified_base 7: mod_base = OTHER; note = 2'-O-methyl modified nucleoside
  modified_base 8: mod_base = OTHER; note = 2'-fluoro modified nucleoside
  modified_base 9: mod_base = OTHER; note = 2'-O-methyl modified nucleoside
  modified_base 10: mod_base = OTHER; note = 2'-fluoro modified nucleoside
  modified_base 11: mod_base = OTHER; note = 2'-O-methyl modified nucleoside
  modified_base 12: mod_base = OTHER; note = 2'-fluoro modified nucleoside
  modified_base 13: mod_base = OTHER; note = 2'-O-methyl modified nucleoside
  modified_base 14: mod_base = OTHER; note = 2'-fluoro modified nucleoside
  modified_base 15: mod_base = OTHER; note = 2'-O-methyl modified nucleoside
  modified_base 16: mod_base = OTHER; note = 2'-fluoro modified nucleoside
  modified_base 17: mod_base = OTHER; note = 2'-O-methyl modified nucleoside
  modified_base 18: mod_base = OTHER; note = 2'-fluoro modified nucleoside
  modified_base 19: mod_base = OTHER; note = 2'-O-methyl modified nucleoside with phosphorothioate linkage
  modified_base 20: mod_base = OTHER; note = 2'-O-methyl modified nucleoside with phosphorothioate linkage
  modified_base 21: mod_base = OTHER; note = 2'-O-methyl modified nucleoside
tttgctaaaaagcaatccatt

SEQ ID NO: 2504 - RNA, 21 nt, synthetic construct
  source 1..21: mol_type = other RNA
  modified_base 1: mod_base = OTHER; note = 2'-O-methyl modified nucleoside with phosphorothioate linkage
  modified_base 2: mod_base = OTHER; note = 2'-fluoro modified nucleoside with phosphorothioate linkage
  modified_base 3: mod_base = OTHER; note = 2'-O-methyl modified nucleoside
  modified_base 4: mod_base = OTHER; note = 2'-fluoro modified nucleoside
  modified_base 5: mod_base = OTHER; note = 2'-O-methyl modified nucleoside
  modified_base 6: mod_base = OTHER; note = 2'-fluoro modified nucleoside
  modified_base 7: mod_base = OTHER; note = 2'-O-methyl modified nucleoside
  modified_base 8: mod_base = OTHER; note = 2'-fluoro modified nucleoside
  modified_base 9: mod_base = OTHER; note = 2'-O-methyl modified nucleoside
  modified_base 10: mod_base = OTHER; note = 2'-fluoro modified nucleoside
  modified_base 11: mod_base = OTHER; note = 2'-O-methyl modified nucleoside
  modified_base 12: mod_base = OTHER; note = 2'-fluoro modified nucleoside
  modified_base 13: mod_base = OTHER; note = 2'-O-methyl modified nucleoside
  modified_base 14: mod_base = OTHER; note = 2'-fluoro modified nucleoside
  modified_base 15: mod_base = OTHER; note = 2'-O-methyl modified nucleoside
  modified_base 16: mod_base = OTHER; note = 2'-fluoro modified nucleoside
  modified_base 17: mod_base = OTHER; note = 2'-O-methyl modified nucleoside
  modified_base 18: mod_base = OTHER; note = 2'-fluoro modified nucleoside
  modified_base 19: mod_base = OTHER; note = 2'-O-methyl modified nucleoside with phosphorothioate linkage
  modified_base 20: mod_base = OTHER; note = 2'-O-methyl modified nucleoside with phosphorothioate linkage
  modified_base 21: mod_base = OTHER; note = 2'-O-methyl modified nucleoside
tgctaagagaactttattttt

SEQ ID NO: 2505 - RNA, 21 nt, synthetic construct
  source 1..21: mol_type = other RNA
  modified_base 1: mod_base = OTHER; note = 2'-O-methyl modified nucleoside with phosphorothioate linkage
  modified_base 2: mod_base = OTHER; note = 2'-O-methyl modified nucleoside
  modified_base 3: mod_base = OTHER; note = 2'-O-methyl modified nucleoside
  modified_base 4: mod_base = OTHER; note = 2'-O-methyl modified nucleoside
  modified_base 5: mod_base = OTHER; note = 2'-O-methyl modified nucleoside
  modified_base 6: mod_base = OTHER; note = 2'-O-methyl modified nucleoside
  modified_base 7: mod_base = OTHER; note = 2'-O-methyl modified nucleoside
  modified_base 8: mod_base = OTHER; note = 2'-O-methyl modified nucleoside
  modified_base 9: mod_base = OTHER; note = 2'-fluoro modified nucleoside
  modified_base 10: mod_base = OTHER; note = 2'-O-methyl modified nucleoside
  modified_base 11: mod_base = OTHER; note = 2'-fluoro modified nucleoside
  modified_base 12: mod_base = OTHER; note = 2'-O-methyl modified nucleoside
  modified_base 13: mod_base = OTHER; note = 2'-O-methyl modified nucleoside
  modified_base 14: mod_base = OTHER; note = 2'-O-methyl modified nucleoside
  modified_base 15: mod_base = OTHER; note = 2'-O-methyl modified nucleoside
  modified_base 16: mod_base = OTHER; note = 2'-O-methyl modified nucleoside
  modified_base 17: mod_base = OTHER; note = 2'-O-methyl modified nucleoside
  modified_base 18: mod_base = OTHER; note = 2'-O-methyl modified nucleoside
  modified_base 19: mod_base = OTHER; note = 2'-O-methyl modified nucleoside with phosphorothioate linkage
  modified_base 20: mod_base = OTHER; note = 2'-O-methyl modified nucleoside with phosphorothioate linkage
  modified_base 21: mod_base = OTHER; note = 2'-O-methyl modified nucleoside
gtatctccagaatgttatatt

SEQ ID NO: 2506 - RNA, 21 nt, synthetic construct
  source 1..21: mol_type = other RNA
  modified_base 1: mod_base = OTHER; note = 2'-O-methyl modified nucleoside with phosphorothioate linkage
  modified_base 2: mod_base = OTHER; note = 2'-O-methyl modified nucleoside
  modified_base 3: mod_base = OTHER; note = 2'-O-methyl modified nucleoside
  modified_base 4: mod_base = OTHER; note = 2'-O-methyl modified nucleoside
  modified_base 5: mod_base = OTHER; note = 2'-O-methyl modified nucleoside
  modified_base 6: mod_base = OTHER; note = 2'-O-methyl modified nucleoside
  modified_base 7: mod_base = OTHER; note = 2'-O-methyl modified nucleoside
  modified_base 8: mod_base = OTHER; note = 2'-fluoro modified nucleoside
  modified_base 9: mod_base = OTHER; note = 2'-fluoro modified nucleoside
  modified_base 10: mod_base = OTHER; note = 2'-fluoro modified nucleoside
  modified_base 11: mod_base = OTHER; note = 2'-fluoro modified nucleoside
  modified_base 12: mod_base = OTHER; note = 2'-O-methyl modified nucleoside
  modified_base 13: mod_base = OTHER; note = 2'-O-methyl modified nucleoside
  modified_base 14: mod_base = OTHER; note = 2'-O-methyl modified nucleoside
  modified_base 15: mod_base = OTHER; note = 2'-O-methyl modified nucleoside
  modified_base 16: mod_base = OTHER; note = 2'-O-methyl modified nucleoside
  modified_base 17: mod_base = OTHER; note = 2'-O-methyl modified nucleoside
  modified_base 18: mod_base = OTHER; note = 2'-O-methyl modified nucleoside
  modified_base 19: mod_base = OTHER; note = 2'-O-methyl modified nucleoside with phosphorothioate linkage
  modified_base 20: mod_base = OTHER; note = 2'-O-methyl modified nucleoside with phosphorothioate linkage
  modified_base 21: mod_base = OTHER; note = 2'-O-methyl modified nucleoside
acttcctggaatcgatacatt

SEQ ID NO: 2507 - RNA, 21 nt, synthetic construct
  source 1..21: mol_type = other RNA
  modified_base 1: mod_base = OTHER; note = 2'-O-methyl modified nucleoside with phosphorothioate linkage
  modified_base 2: mod_base = OTHER; note = 2'-O-methyl modified nucleoside
  modified_base 3: mod_base = OTHER; note = 2'-O-methyl modified nucleoside
  modified_base 4: mod_base = OTHER; note = 2'-O-methyl modified nucleoside
  modified_base 5: mod_base = OTHER; note = 2'-O-methyl modified nucleoside
  modified_base 6: mod_base = OTHER; note = 2'-O-methyl modified nucleoside
  modified_base 7: mod_base = OTHER; note = 2'-fluoro modified nucleoside
  modified_base 8: mod_base = OTHER; note = 2'-fluoro modified nucleoside
  modified_base 9: mod_base = OTHER; note = 2'-fluoro modified nucleoside
  modified_base 10: mod_base = OTHER; note = 2'-fluoro modified nucleoside
  modified_base 11: mod_base = OTHER; note = 2'-O-methyl modified nucleoside
  modified_base 12: mod_base = OTHER; note = 2'-O-methyl modified nucleoside
  modified_base 13: mod_base = OTHER; note = 2'-O-methyl modified nucleoside
  modified_base 14: mod_base = OTHER; note = 2'-O-methyl modified nucleoside
  modified_base 15: mod_base = OTHER; note = 2'-O-methyl modified nucleoside
  modified_base 16: mod_base = OTHER; note = 2'-O-methyl modified nucleoside
  modified_base 17: mod_base = OTHER; note = 2'-O-methyl modified nucleoside
  modified_base 18: mod_base = OTHER; note = 2'-O-methyl modified nucleoside
  modified_base 19: mod_base = OTHER; note = 2'-O-methyl modified nucleoside with phosphorothioate linkage
  modified_base 20: mod_base = OTHER; note = 2'-O-methyl modified nucleoside with phosphorothioate linkage
  modified_base 21: mod_base = OTHER; note = 2'-O-methyl modified nucleoside
cttcctggaatcgatactatt

SEQ ID NO: 2508 - RNA, 21 nt, synthetic construct
  source 1..21: mol_type = other RNA
  modified_base 1: mod_base = OTHER; note = 2'-O-methyl modified nucleoside with phosphorothioate linkage
  modified_base 2: mod_base = OTHER; note = 2'-O-methyl modified nucleoside
  modified_base 3: mod_base = OTHER; note = 2'-O-methyl modified nucleoside
  modified_base 4: mod_base = OTHER; note = 2'-O-methyl modified nucleoside
  modified_base 5: mod_base = OTHER; note = 2'-fluoro modified nucleoside
  modified_base 6: mod_base = OTHER; note = 2'-fluoro modified nucleoside
  modified_base 7: mod_base = OTHER; note = 2'-O-methyl modified nucleoside
  modified_base 8: mod_base = OTHER; note = 2'-O-methyl modified nucleoside
  modified_base 9: mod_base = OTHER; note = 2'-fluoro modified nucleoside
  modified_base 10: mod_base = OTHER; note = 2'-fluoro modified nucleoside
  modified_base 11: mod_base = OTHER; note = 2'-O-methyl modified nucleoside
  modified_base 12: mod_base = OTHER; note = 2'-O-methyl modified nucleoside
  modified_base 13: mod_base = OTHER; note = 2'-O-methyl modified nucleoside
  modified_base 14: mod_base = OTHER; note = 2'-O-methyl modified nucleoside
  modified_base 15: mod_base = OTHER; note = 2'-O-methyl modified nucleoside
  modified_base 16: mod_base = OTHER; note = 2'-O-methyl modified nucleoside
  modified_base 17: mod_base = OTHER; note = 2'-O-methyl modified nucleoside
  modified_base 18: mod_base = OTHER; note = 2'-O-methyl modified nucleoside
  modified_base 19: mod_base = OTHER; note = 2'-O-methyl modified nucleoside with phosphorothioate linkage
  modified_base 20: mod_base = OTHER; note = 2'-O-methyl modified nucleoside with phosphorothioate linkage
  modified_base 21: mod_base = OTHER; note = 2'-O-methyl modified nucleoside
ctggaatcgatacttgtaatt

SEQ ID NO: 2509 - RNA, 21 nt, synthetic construct
  source 1..21: mol_type = other RNA
  modified_base 1: mod_base = OTHER; note = 2'-O-methyl modified nucleoside with phosphorothioate linkage
  modified_base 2: mod_base = OTHER; note = 2'-O-methyl modified nucleoside
  modified_base 3: mod_base = OTHER; note = 2'-O-methyl modified nucleoside
  modified_base 4: mod_base = OTHER; note = 2'-O-methyl modified nucleoside
  modified_base 5: mod_base = OTHER; note = 2'-fluoro modified nucleoside
  modified_base 6: mod_base = OTHER; note = 2'-fluoro modified nucleoside
  modified_base 7: mod_base = OTHER; note = 2'-O-methyl modified nucleoside
  modified_base 8: mod_base = OTHER; note = 2'-O-methyl modified nucleoside
  modified_base 9: mod_base = OTHER; note = 2'-fluoro modified nucleoside
  modified_base 10: mod_base = OTHER; note = 2'-O-methyl modified nucleoside
  modified_base 11: mod_base = OTHER; note = 2'-fluoro modified nucleoside
  modified_base 12: mod_base = OTHER; note = 2'-O-methyl modified nucleoside
  modified_base 13: mod_base = OTHER; note = 2'-O-methyl modified nucleoside
  modified_base 14: mod_base = OTHER; note = 2'-O-methyl modified nucleoside
  modified_base 15: mod_base = OTHER; note = 2'-O-methyl modified nucleoside
  modified_base 16: mod_base = OTHER; note = 2'-O-methyl modified nucleoside
  modified_base 17: mod_base = OTHER; note = 2'-O-methyl modified nucleoside
  modified_base 18: mod_base = OTHER; note = 2'-O-methyl modified nucleoside
  modified_base 19: mod_base = OTHER; note = 2'-O-methyl modified nucleoside with phosphorothioate linkage
  modified_base 20: mod_base = OTHER; note = 2'-O-methyl modified nucleoside with phosphorothioate linkage
  modified_base 21: mod_base = OTHER; note = 2'-O-methyl modified nucleoside
ggaatcgatacttgtattatt

SEQ ID NO: 2510 - RNA, 21 nt, synthetic construct
  source 1..21: mol_type = other RNA
  modified_base 1: mod_base = OTHER; note = 2'-O-methyl modified nucleoside with phosphorothioate linkage
  modified_base 2: mod_base = OTHER; note = 2'-O-methyl modified nucleoside
  modified_base 3: mod_base = OTHER; note = 2'-O-methyl modified nucleoside
  modified_base 4: mod_base = OTHER; note = 2'-O-methyl modified nucleoside
  modified_base 5: mod_base = OTHER; note = 2'-fluoro modified nucleoside
  modified_base 6: mod_base = OTHER; note = 2'-fluoro modified nucleoside
  modified_base 7: mod_base = OTHER; note = 2'-O-methyl modified nucleoside
  modified_base 8: mod_base = OTHER; note = 2'-fluoro modified nucleoside
  modified_base 9: mod_base = OTHER; note = 2'-fluoro modified nucleoside
  modified_base 10: mod_base = OTHER; note = 2'-O-methyl modified nucleoside
  modified_base 11: mod_base = OTHER; note = 2'-O-methyl modified nucleoside
  modified_base 12: mod_base = OTHER; note = 2'-O-methyl modified nucleoside
  modified_base 13: mod_base = OTHER; note = 2'-O-methyl modified nucleoside
  modified_base 14: mod_base = OTHER; note = 2'-O-methyl modified nucleoside
  modified_base 15: mod_base = OTHER; note = 2'-O-methyl modified nucleoside
  modified_base 16: mod_base = OTHER; note = 2'-O-methyl modified nucleoside
  modified_base 17: mod_base = OTHER; note = 2'-O-methyl modified nucleoside
  modified_base 18: mod_base = OTHER; note = 2'-O-methyl modified nucleoside
  modified_base 19: mod_base = OTHER; note = 2'-O-methyl modified nucleoside with phosphorothioate linkage
  modified_base 20: mod_base = OTHER; note = 2'-O-methyl modified nucleoside with phosphorothioate linkage
  modified_base 21: mod_base = OTHER; note = 2'-O-methyl modified nucleoside
gatgctttctacaaaggtatt

SEQ ID NO: 2511 - RNA, 21 nt, synthetic construct
  source 1..21: mol_type = other RNA
  modified_base 1: mod_base = OTHER; note = 2'-O-methyl modified nucleoside with phosphorothioate linkage
  modified_base 2: mod_base = OTHER; note = 2'-O-methyl modified nucleoside
  modified_base 3: mod_base = OTHER; note = 2'-O-methyl modified nucleoside
  modified_base 4: mod_base = OTHER; note = 2'-O-methyl modified nucleoside
  modified_base 5: mod_base = OTHER; note = 2'-fluoro modified nucleoside
  modified_base 6: mod_base = OTHER; note = 2'-fluoro modified nucleoside
  modified_base 7: mod_base = OTHER; note = 2'-O-methyl modified nucleoside
  modified_base 8: mod_base = OTHER; note = 2'-O-methyl modified nucleoside
  modified_base 9: mod_base = OTHER; note = 2'-fluoro modified nucleoside
  modified_base 10: mod_base = OTHER; note = 2'-fluoro modified nucleoside
  modified_base 11: mod_base = OTHER; note = 2'-O-methyl modified nucleoside
  modified_base 12: mod_base = OTHER; note = 2'-O-methyl modified nucleoside
  modified_base 13: mod_base = OTHER; note = 2'-O-methyl modified nucleoside
  modified_base 14: mod_base = OTHER; note = 2'-O-methyl modified nucleoside
  modified_base 15: mod_base = OTHER; note = 2'-O-methyl modified nucleoside
  modified_base 16: mod_base = OTHER; note = 2'-O-methyl modified nucleoside
  modified_base 17: mod_base = OTHER; note = 2'-O-methyl modified nucleoside
  modified_base 18: mod_base = OTHER; note = 2'-O-methyl modified nucleoside
  modified_base 19: mod_base = OTHER; note = 2'-O-methyl modified nucleoside with phosphorothioate linkage
  modified_base 20: mod_base = OTHER; note = 2'-O-methyl modified nucleoside with phosphorothioate linkage
  modified_base 21: mod_base = OTHER; note = 2'-O-methyl modified nucleoside
agaaaagcagaacggtgaatt

SEQ ID NO: 2512 - DNA, 21 bp, synthetic construct
  source 1..21: mol_type = other DNA
  modified_base 1: mod_base = OTHER; note = 2'-O-methyl modified nucleoside with phosphorothioate linkage
  modified_base 2: mod_base = OTHER; note = 2'-O-methyl modified nucleoside
  modified_base 3: mod_base = OTHER; note = 2'-O-methyl modified nucleoside
  modified_base 4: mod_base = OTHER; note = 2'-O-methyl modified nucleoside
  modified_base 5: mod_base = OTHER; note = 2'-O-methyl modified nucleoside
  modified_base 6: mod_base = OTHER; note = 2'-O-methyl modified nucleoside
  modified_base 7: mod_base = OTHER; note = 2'-fluoro modified nucleoside
  modified_base 8: mod_base = OTHER; note = 2'-fluoro modified nucleoside
  modified_base 10: mod_base = OTHER; note = 2'-fluoro modified nucleoside
  modified_base 11: mod_base = OTHER; note = 2'-O-methyl modified nucleoside
  modified_base 12: mod_base = OTHER; note = 2'-O-methyl modified nucleoside
  modified_base 13: mod_base = OTHER; note = 2'-O-methyl modified nucleoside
  modified_base 14: mod_base = OTHER; note = 2'-O-methyl modified nucleoside
  modified_base 15: mod_base = OTHER; note = 2'-O-methyl modified nucleoside
  modified_base 16: mod_base = OTHER; note = 2'-O-methyl modified nucleoside
  modified_base 17: mod_base = OTHER; note = 2'-O-methyl modified nucleoside
  modified_base 18: mod_base = OTHER; note = 2'-O-methyl modified nucleoside
  modified_base 19: mod_base = OTHER; note = 2'-O-methyl modified nucleoside with phosphorothioate linkage
  modified_base 20: mod_base = OTHER; note = 2'-O-methyl modified nucleoside with phosphorothioate linkage
  modified_base 21: mod_base = OTHER; note = 2'-O-methyl modified nucleoside
  misc_feature 1..8: note = RNA
  misc_feature 9: note = DNA
  misc_feature 10..21: note = RNA
aagcagaacggtgaaagtatt

SEQ ID NO: 2513 - RNA, 21 nt, synthetic construct
  source 1..21: mol_type = other RNA
  modified_base 1: mod_base = OTHER; note = 2'-O-methyl modified nucleoside with phosphorothioate linkage
  modified_base 2: mod_base = OTHER; note = 2'-O-methyl modified nucleoside
  modified_base 3: mod_base = OTHER; note = 2'-O-methyl modified nucleoside
  modified_base 4: mod_base = OTHER; note = 2'-O-methyl modified nucleoside
  modified_base 5: mod_base = OTHER; note = 2'-fluoro modified nucleoside
  modified_base 6: mod_base = OTHER; note = 2'-fluoro modified nucleoside
  modified_base 7: mod_base = OTHER; note = 2'-O-methyl modified nucleoside
  modified_base 8: mod_base = OTHER; note = 2'-fluoro modified nucleoside
  modified_base 9: mod_base = OTHER; note = 2'-fluoro modified nucleoside
  modified_base 10: mod_base = OTHER; note = 2'-O-methyl modified nucleoside
  modified_base 11: mod_base = OTHER; note = 2'-fluoro modified nucleoside
  modified_base 12: mod_base = OTHER; note = 2'-O-methyl modified nucleoside
  modified_base 13: mod_base = OTHER; note = 2'-O-methyl modified nucleoside
  modified_base 14: mod_base = OTHER; note = 2'-O-methyl modified nucleoside
  modified_base 15: mod_base = OTHER; note = 2'-O-methyl modified nucleoside
  modified_base 16: mod_base = OTHER; note = 2'-O-methyl modified nucleoside
  modified_base 17: mod_base = OTHER; note = 2'-O-methyl modified nucleoside
  modified_base 18: mod_base = OTHER; note = 2'-O-methyl modified nucleoside
  modified_base 19: mod_base = OTHER; note = 2'-O-methyl modified nucleoside with phosphorothioate linkage
  modified_base 20: mod_base = OTHER; note = 2'-O-methyl modified nucleoside with phosphorothioate linkage
  modified_base 21: mod_base = OTHER; note = 2'-O-methyl modified nucleoside
agtgggagatacattggaatt

SEQ ID NO: 2514 - RNA, 21 nt, synthetic construct
  source 1..21: mol_type = other RNA
  modified_base 1: mod_base = OTHER; note = 2'-O-methyl modified nucleoside with phosphorothioate linkage
  modified_base 2: mod_base = OTHER; note = 2'-O-methyl modified nucleoside
  modified_base 3: mod_base = OTHER; note = 2'-O-methyl modified nucleoside
  modified_base 4: mod_base = OTHER; note = 2'-O-methyl modified nucleoside
  modified_base 5: mod_base = OTHER; note = 2'-fluoro modified nucleoside
  modified_base 6: mod_base = OTHER; note = 2'-fluoro modified nucleoside
  modified_base 7: mod_base = OTHER; note = 2'-O-methyl modified nucleoside
  modified_base 8: mod_base = OTHER; note = 2'-O-methyl modified nucleoside
  modified_base 9: mod_base = OTHER; note = 2'-fluoro modified nucleoside
  modified_base 10: mod_base = OTHER; note = 2'-O-methyl modified nucleoside
  modified_base 11: mod_base = OTHER; note = 2'-fluoro modified nucleoside
  modified_base 12: mod_base = OTHER; note = 2'-O-methyl modified nucleoside
  modified_base 13: mod_base = OTHER; note = 2'-O-methyl modified nucleoside
  modified_base 14: mod_base = OTHER; note = 2'-O-methyl modified nucleoside
  modified_base 15: mod_base = OTHER; note = 2'-O-methyl modified nucleoside
  modified_base 16: mod_base = OTHER; note = 2'-O-methyl modified nucleoside
  modified_base 17: mod_base = OTHER; note = 2'-O-methyl modified nucleoside
  modified_base 18: mod_base = OTHER; note = 2'-O-methyl modified nucleoside
  modified_base 19: mod_base = OTHER; note = 2'-O-methyl modified nucleoside with phosphorothioate linkage
  modified_base 20: mod_base = OTHER; note = 2'-O-methyl modified nucleoside with phosphorothioate linkage
  modified_base 21: mod_base = OTHER; note = 2'-O-methyl modified nucleoside
tgggagatacattggatcatt

SEQ ID NO: 2515 - RNA, 21 nt, synthetic construct
  source 1..21: mol_type = other RNA
  modified_base 1: mod_base = OTHER; note = 2'-O-methyl modified nucleoside with phosphorothioate linkage
  modified_base 2: mod_base = OTHER; note = 2'-fluoro modified nucleoside with phosphorothioate linkage
  modified_base 3: mod_base = OTHER; note = 2'-O-methyl modified nucleoside
  modified_base 4: mod_base = OTHER; note = 2'-fluoro modified nucleoside
  modified_base 5: mod_base = OTHER; note = 2'-O-methyl modified nucleoside
  modified_base 6: mod_base = OTHER; note = 2'-fluoro modified nucleoside
  modified_base 7: mod_base = OTHER; note = 2'-O-methyl modified nucleoside
  modified_base 8: mod_base = OTHER; note = 2'-fluoro modified nucleoside
  modified_base 9: mod_base = OTHER; note = 2'-O-methyl modified nucleoside
  modified_base 10: mod_base = OTHER; note = 2'-fluoro modified nucleoside
  modified_base 11: mod_base = OTHER; note = 2'-O-methyl modified nucleoside
  modified_base 12: mod_base = OTHER; note = 2'-fluoro modified nucleoside
  modified_base 13: mod_base = OTHER; note = 2'-O-methyl modified nucleoside
  modified_base 14: mod_base = OTHER; note = 2'-fluoro modified nucleoside
  modified_base 15: mod_base = OTHER; note = 2'-O-methyl modified nucleoside
  modified_base 16: mod_base = OTHER; note = 2'-fluoro modified nucleoside
  modified_base 17: mod_base = OTHER; note = 2'-O-methyl modified nucleoside
  modified_base 18: mod_base = OTHER; note = 2'-fluoro modified nucleoside
  modified_base 19: mod_base = OTHER; note = 2'-O-methyl modified nucleoside with phosphorothioate linkage
  modified_base 20: mod_base = OTHER; note = 2'-O-methyl modified nucleoside with phosphorothioate linkage
  modified_base 21: mod_base = OTHER; note = 2'-O-methyl modified nucleoside
tataacattctggagatactt

SEQ ID NO: 2516 - RNA, 21 nt, synthetic construct
  source 1..21: mol_type = other RNA
  modified_base 1: mod_base = OTHER; note = 2'-O-methyl modified nucleoside with phosphorothioate linkage
  modified_base 2: mod_base = OTHER; note = 2'-fluoro modified nucleoside with phosphorothioate linkage
  modified_base 3: mod_base = OTHER; note = 2'-O-methyl modified nucleoside
  modified_base 4: mod_base = OTHER; note = 2'-fluoro modified nucleoside with phosphorothioate linkage
  modified_base 5: mod_base = OTHER; note = 2'-O-methyl modified nucleoside
  modified_base 6: mod_base = OTHER; note = 2'-fluoro modified nucleoside
  modified_base 7: mod_base = OTHER; note = 2'-O-methyl modified nucleoside
  modified_base 8: mod_base = OTHER; note = 2'-fluoro modified nucleoside
  modified_base 9: mod_base = OTHER; note = 2'-O-methyl modified nucleoside
  modified_base 10: mod_base = OTHER; note = 2'-fluoro modified nucleoside
  modified_base 11: mod_base = OTHER; note = 2'-O-methyl modified nucleoside
  modified_base 12: mod_base = OTHER; note = 2'-fluoro modified nucleoside
  modified_base 13: mod_base = OTHER; note = 2'-O-methyl modified nucleoside
  modified_base 14: mod_base = OTHER; note = 2'-fluoro modified nucleoside
  modified_base 15: mod_base = OTHER; note = 2'-O-methyl modified nucleoside
  modified_base 16: mod_base = OTHER; note = 2'-fluoro modified nucleoside
  modified_base 17: mod_base = OTHER; note = 2'-O-methyl modified nucleoside
  modified_base 18: mod_base = OTHER; note = 2'-fluoro modified nucleoside
  modified_base 19: mod_base = OTHER; note = 2'-O-methyl modified nucleoside with phosphorothioate linkage
  modified_base 20: mod_base = OTHER; note = 2'-O-methyl modified nucleoside with phosphorothioate linkage
  modified_base 21: mod_base = OTHER; note = 2'-O-methyl modified nucleoside
tgtatcgattccaggaagttt

SEQ ID NO: 2517 - RNA, 21 nt, synthetic construct
  source 1..21: mol_type = other RNA
  modified_base 1: mod_base = OTHER; note = 2'-O-methyl modified nucleoside with phosphorothioate linkage
  modified_base 2: mod_base = OTHER; note = 2'-fluoro modified nucleoside with phosphorothioate linkage
  modified_base 3: mod_base = OTHER; note = 2'-O-methyl modified nucleoside
  modified_base 4: mod_base = OTHER; note = 2'-fluoro modified nucleoside
  modified_base 5: mod_base = OTHER; note = 2'-O-methyl modified nucleoside
  modified_base 6: mod_base = OTHER; note = 2'-fluoro modified nucleoside
  modified_base 7: mod_base = OTHER; note = 2'-O-methyl modified nucleoside
  modified_base 8: mod_base = OTHER; note = 2'-fluoro modified nucleoside
  modified_base 9: mod_base = OTHER; note = 2'-O-methyl modified nucleoside
  modified_base 10: mod_base = OTHER; note = 2'-fluoro modified nucleoside
  modified_base 11: mod_base = OTHER; note = 2'-O-methyl modified nucleoside
  modified_base 12: mod_base = OTHER; note = 2'-fluoro modified nucleoside
  modified_base 13: mod_base = OTHER; note = 2'-O-methyl modified nucleoside
  modified_base 14: mod_base = OTHER; note = 2'-fluoro modified nucleoside
  modified_base 15: mod_base = OTHER; note = 2'-O-methyl modified nucleoside
  modified_base 16: mod_base = OTHER; note = 2'-fluoro modified nucleoside
  modified_base 17: mod_base = OTHER; note = 2'-O-methyl modified nucleoside
  modified_base 18: mod_base = OTHER; note = 2'-fluoro modified nucleoside
  modified_base 19: mod_base = OTHER; note = 2'-O-methyl modified nucleoside with phosphorothioate linkage
  modified_base 20: mod_base = OTHER; note = 2'-O-methyl modified nucleoside with phosphorothioate linkage
  modified_base 21: mod_base = OTHER; note = 2'-O-methyl modified nucleoside
tagtatcgattccaggaagtt

SEQ ID NO: 2518 - RNA, 21 nt, synthetic construct
  source 1..21: mol_type = other RNA
  modified_base 1: mod_base = OTHER; note = 2'-O-methyl modified nucleoside with phosphorothioate linkage
  modified_base 2: mod_base = OTHER; note = 2'-fluoro modified nucleoside with phosphorothioate linkage
  modified_base 3: mod_base = OTHER; note = 2'-O-methyl modified nucleoside
  modified_base 4: mod_base = OTHER; note = 2'-fluoro modified nucleoside
  modified_base 5: mod_base = OTHER; note = 2'-O-methyl modified nucleoside
  modified_base 6: mod_base = OTHER; note = 2'-fluoro modified nucleoside
  modified_base 7: mod_base = OTHER; note = 2'-O-methyl modified nucleoside
  modified_base 8: mod_base = OTHER; note = 2'-fluoro modified nucleoside
  modified_base 9: mod_base = OTHER; note = 2'-O-methyl modified nucleoside
  modified_base 10: mod_base = OTHER; note = 2'-fluoro modified nucleoside
  modified_base 11: mod_base = OTHER; note = 2'-O-methyl modified nucleoside
  modified_base 12: mod_base = OTHER; note = 2'-fluoro modified nucleoside
  modified_base 13: mod_base = OTHER; note = 2'-O-methyl modified nucleoside
  modified_base 14: mod_base = OTHER; note = 2'-fluoro modified nucleoside
  modified_base 15: mod_base = OTHER; note = 2'-O-methyl modified nucleoside
  modified_base 16: mod_base = OTHER; note = 2'-fluoro modified nucleoside
  modified_base 17: mod_base = OTHER; note = 2'-O-methyl modified nucleoside
  modified_base 18: mod_base = OTHER; note = 2'-fluoro modified nucleoside
  modified_base 19: mod_base = OTHER; note = 2'-O-methyl modified nucleoside with phosphorothioate linkage
  modified_base 20: mod_base = OTHER; note = 2'-O-methyl modified nucleoside with phosphorothioate linkage
  modified_base 21: mod_base = OTHER; note = 2'-O-methyl modified nucleoside
ttacaagtatcgattccagtt

SEQ ID NO: 2519 - RNA, 21 nt, synthetic construct
  source 1..21: mol_type = other RNA
  modified_base 1: mod_base = OTHER; note = 2'-O-methyl modified nucleoside with phosphorothioate linkage
  modified_base 2: mod_base = OTHER; note = 2'-fluoro modified nucleoside with phosphorothioate linkage
  modified_base 3: mod_base = OTHER; note = 2'-O-methyl modified nucleoside
  modified_base 4: mod_base = OTHER; note = 2'-fluoro modified nucleoside
  modified_base 5: mod_base = OTHER; note = 2'-O-methyl modified nucleoside
  modified_base 6: mod_base = OTHER; note = 2'-fluoro modified nucleoside
  modified_base 7: mod_base = OTHER; note = 2'-O-methyl modified nucleoside
  modified_base 8: mod_base = OTHER; note = 2'-fluoro modified nucleoside
  modified_base 9: mod_base = OTHER; note = 2'-O-methyl modified nucleoside
  modified_base 10: mod_base = OTHER; note = 2'-fluoro modified nucleoside
  modified_base 11: mod_base = OTHER; note = 2'-O-methyl modified nucleoside
  modified_base 12: mod_base = OTHER; note = 2'-fluoro modified nucleoside
  modified_base 13: mod_base = OTHER; note = 2'-O-methyl modified nucleoside
  modified_base 14: mod_base = OTHER; note = 2'-fluoro modified nucleoside
  modified_base 15: mod_base = OTHER; note = 2'-O-methyl modified nucleoside
  modified_base 16: mod_base = OTHER; note = 2'-fluoro modified nucleoside
  modified_base 17: mod_base = OTHER; note = 2'-O-methyl modified nucleoside
  modified_base 18: mod_base = OTHER; note = 2'-fluoro modified nucleoside
  modified_base 19: mod_base = OTHER; note = 2'-O-methyl modified nucleoside with phosphorothioate linkage
  modified_base 20: mod_base = OTHER; note = 2'-O-methyl modified nucleoside with phosphorothioate linkage
  modified_base 21: mod_base = OTHER; note = 2'-O-methyl modified nucleoside
taatacaagtatcgattcctt

SEQ ID NO: 2520 - RNA, 21 nt, synthetic construct
  source 1..21: mol_type = other RNA
  modified_base 1: mod_base = OTHER; note = 2'-O-methyl modified nucleoside with phosphorothioate linkage
  modified_base 2: mod_base = OTHER; note = 2'-fluoro modified nucleoside with phosphorothioate linkage
  modified_base 3: mod_base = OTHER; note = 2'-O-methyl modified nucleoside
  modified_base 4: mod_base = OTHER; note = 2'-fluoro modified nucleoside
  modified_base 5: mod_base = OTHER; note = 2'-O-methyl modified nucleoside
  modified_base 6: mod_base = OTHER; note = 2'-fluoro modified nucleoside
  modified_base 7: mod_base = OTHER; note = 2'-O-methyl modified nucleoside
  modified_base 8: mod_base = OTHER; note = 2'-fluoro modified nucleoside
  modified_base 9: mod_base = OTHER; note = 2'-O-methyl modified nucleoside
  modified_base 10: mod_base = OTHER; note = 2'-fluoro modified nucleoside
  modified_base 11: mod_base = OTHER; note = 2'-O-methyl modified nucleoside
  modified_base 12: mod_base = OTHER; note = 2'-fluoro modified nucleoside
  modified_base 13: mod_base = OTHER; note = 2'-O-methyl modified nucleoside
  modified_base 14: mod_base = OTHER; note = 2'-fluoro modified nucleoside
  modified_base 15: mod_base = OTHER; note = 2'-O-methyl modified nucleoside
  modified_base 16: mod_base = OTHER; note = 2'-fluoro modified nucleoside
  modified_base 17: mod_base = OTHER; note = 2'-O-methyl modified nucleoside
  modified_base 18: mod_base = OTHER; note = 2'-fluoro modified nucleoside
  modified_base 19: mod_base = OTHER; note = 2'-O-methyl modified nucleoside with phosphorothioate linkage
  modified_base 20: mod_base = OTHER; note = 2'-O-methyl modified nucleoside with phosphorothioate linkage
  modified_base 21: mod_base = OTHER; note = 2'-O-methyl modified nucleoside
tacctttgtagaaagcatctt

SEQ ID NO: 2521 - RNA, 21 nt, synthetic construct
  source 1..21: mol_type = other RNA
  modified_base 1: mod_base = OTHER; note = 2'-O-methyl modified nucleoside with phosphorothioate linkage
  modified_base 2: mod_base = OTHER; note = 2'-fluoro modified nucleoside with phosphorothioate linkage
  modified_base 3: mod_base = OTHER; note = 2'-O-methyl modified nucleoside
  modified_base 4: mod_base = OTHER; note = 2'-fluoro modified nucleoside
  modified_base 5: mod_base = OTHER; note = 2'-O-methyl modified nucleoside
  modified_base 6: mod_base = OTHER; note = 2'-fluoro modified nucleoside
  modified_base 7: mod_base = OTHER; note = 2'-O-methyl modified nucleoside
  modified_base 8: mod_base = OTHER; note = 2'-fluoro modified nucleoside
  modified_base 9: mod_base = OTHER; note = 2'-O-methyl modified nucleoside
  modified_base 10: mod_base = OTHER; note = 2'-fluoro modified nucleoside
  modified_base 11: mod_base = OTHER; note = 2'-O-methyl modified nucleoside
  modified_base 12: mod_base = OTHER; note = 2'-fluoro modified nucleoside
  modified_base 13: mod_base = OTHER; note = 2'-O-methyl modified nucleoside
  modified_base 14: mod_base = OTHER; note = 2'-fluoro modified nucleoside
  modified_base 15: mod_base = OTHER; note = 2'-O-methyl modified nucleoside
  modified_base 16: mod_base = OTHER; note = 2'-fluoro modified nucleoside
  modified_base 17: mod_base = OTHER; note = 2'-O-methyl modified nucleoside
  modified_base 18: mod_base = OTHER; note = 2'-fluoro modified nucleoside
  modified_base 19: mod_base = OTHER; note = 2'-O-methyl modified nucleoside with phosphorothioate linkage
  modified_base 20: mod_base = OTHER; note = 2'-O-methyl modified nucleoside with phosphorothioate linkage
  modified_base 21: mod_base = OTHER; note = 2'-O-methyl modified nucleoside
ttcaccgttctgcttttcttt

SEQ ID NO: 2522 - RNA, 21 nt, synthetic construct
  source 1..21: mol_type = other RNA
  modified_base 1: mod_base = OTHER; note = 2'-O-methyl modified nucleoside with phosphorothioate linkage
  modified_base 2: mod_base = OTHER; note = 2'-fluoro modified nucleoside with phosphorothioate linkage
  modified_base 3: mod_base = OTHER; note = 2'-O-methyl modified nucleoside
  modified_base 4: mod_base = OTHER; note = 2'-fluoro modified nucleoside
  modified_base 5: mod_base = OTHER; note = 2'-O-methyl modified nucleoside
  modified_base 6: mod_base = OTHER; note = 2'-fluoro modified nucleoside
  modified_base 7: mod_base = OTHER; note = 2'-O-methyl modified nucleoside
  modified_base 8: mod_base = OTHER; note = 2'-fluoro modified nucleoside
  modified_base 9: mod_base = OTHER; note = 2'-O-methyl modified nucleoside
  modified_base 10: mod_base = OTHER; note = 2'-fluoro modified nucleoside
  modified_base 11: mod_base = OTHER; note = 2'-O-methyl modified nucleoside
  modified_base 12: mod_base = OTHER; note = 2'-fluoro modified nucleoside
  modified_base 13: mod_base = OTHER; note = 2'-O-methyl modified nucleoside
  modified_base 14: mod_base = OTHER; note = 2'-fluoro modified nucleoside
  modified_base 15: mod_base = OTHER; note = 2'-O-methyl modified nucleoside
  modified_base 16: mod_base = OTHER; note = 2'-fluoro modified nucleoside
  modified_base 17: mod_base = OTHER; note = 2'-O-methyl modified nucleoside
  modified_base 18: mod_base = OTHER; note = 2'-fluoro modified nucleoside
  modified_base 19: mod_base = OTHER; note = 2'-O-methyl modified nucleoside with phosphorothioate linkage
  modified_base 20: mod_base = OTHER; note = 2'-O-methyl modified nucleoside with phosphorothioate linkage
  modified_base 21: mod_base = OTHER; note = 2'-O-methyl modified nucleoside
tactttcaccgttctgctttt

SEQ ID NO: 2523 - RNA, 21 nt, synthetic construct
  source 1..21: mol_type = other RNA
  modified_base 1: mod_base = OTHER; note = 2'-O-methyl modified nucleoside with phosphorothioate linkage
  modified_base 2: mod_base = OTHER; note = 2'-fluoro modified nucleoside with phosphorothioate linkage
  modified_base 3: mod_base = OTHER; note = 2'-O-methyl modified nucleoside
  modified_base 4: mod_base = OTHER; note = 2'-fluoro modified nucleoside
  modified_base 5: mod_base = OTHER; note = 2'-O-methyl modified nucleoside
  modified_base 6: mod_base = OTHER; note = 2'-fluoro modified nucleoside
  modified_base 7: mod_base = OTHER; note = 2'-O-methyl modified nucleoside
  modified_base 8: mod_base = OTHER; note = 2'-fluoro modified nucleoside
  modified_base 9: mod_base = OTHER; note = 2'-O-methyl modified nucleoside
  modified_base 10: mod_base = OTHER; note = 2'-fluoro modified nucleoside
  modified_base 11: mod_base = OTHER; note = 2'-O-methyl modified nucleoside
  modified_base 12: mod_base = OTHER; note = 2'-fluoro modified nucleoside
  modified_base 13: mod_base = OTHER; note = 2'-O-methyl modified nucleoside
  modified_base 14: mod_base = OTHER; note = 2'-fluoro modified nucleoside
  modified_base 15: mod_base = OTHER; note = 2'-O-methyl modified nucleoside
  modified_base 16: mod_base = OTHER; note = 2'-fluoro modified nucleoside
  modified_base 17: mod_base = OTHER; note = 2'-O-methyl modified nucleoside
  modified_base 18: mod_base = OTHER; note = 2'-fluoro modified nucleoside
  modified_base 19: mod_base = OTHER; note = 2'-O-methyl modified nucleoside with phosphorothioate linkage
  modified_base 20: mod_base = OTHER; note = 2'-O-methyl modified nucleoside with phosphorothioate linkage
  modified_base 21: mod_base = OTHER; note = 2'-O-methyl modified nucleoside
ttccaatgtatctcccacttt

SEQ ID NO: 2524 - RNA, 21 nt, synthetic construct
  source 1..21: mol_type = other RNA
  modified_base 1: mod_base = OTHER; note = 2'-O-methyl modified nucleoside with phosphorothioate linkage
  modified_base 2: mod_base = OTHER; note = 2'-fluoro modified nucleoside with phosphorothioate linkage
  modified_base 3: mod_base = OTHER; note = 2'-O-methyl modified nucleoside
  modified_base 4: mod_base = OTHER; note = 2'-fluoro modified nucleoside
  modified_base 5: mod_base = OTHER; note = 2'-O-methyl modified nucleoside
  modified_base 6: mod_base = OTHER; note = 2'-fluoro modified nucleoside
  modified_base 7: mod_base = OTHER; note = 2'-O-methyl modified nucleoside
  modified_base 8: mod_base = OTHER; note = 2'-fluoro modified nucleoside
  modified_base 9: mod_base = OTHER; note = 2'-O-methyl modified nucleoside
  modified_base 10: mod_base = OTHER; note = 2'-fluoro modified nucleoside
  modified_base 11: mod_base = OTHER; note = 2'-O-methyl modified nucleoside
  modified_base 12: mod_base = OTHER; note = 2'-fluoro modified nucleoside
  modified_base 13: mod_base = OTHER; note = 2'-O-methyl modified nucleoside
  modified_base 14: mod_base = OTHER; note = 2'-fluoro modified nucleoside
  modified_base 15: mod_base = OTHER; note = 2'-O-methyl modified nucleoside
  modified_base 16: mod_base = OTHER; note = 2'-fluoro modified nucleoside
  modified_base 17: mod_base = OTHER; note = 2'-O-methyl modified nucleoside
  modified_base 18: mod_base = OTHER; note = 2'-fluoro modified nucleoside
  modified_base 19: mod_base = OTHER; note = 2'-O-methyl modified nucleoside with phosphorothioate linkage
  modified_base 20: mod_base = OTHER; note = 2'-O-methyl modified nucleoside with phosphorothioate linkage
  modified_base 21: mod_base = OTHER; note = 2'-O-methyl modified nucleoside
tgatccaatgtatctcccatt

SEQ ID NO: 2525-2549 - skipped (25 entries)

SEQ ID NO: 2550 - RNA, 21 nt, synthetic construct
  source 1..21: mol_type = other RNA
tcgatacttgtatttttcatt

SEQ ID NO: 2551 - RNA, 21 nt, synthetic construct
  source 1..21: mol_type = other RNA
ctacaaaggtgaactcagatt

SEQ ID NO: 2552 - RNA, 21 nt, synthetic construct
  source 1..21: mol_type = other RNA
atggaagaaaagcagaacatt

SEQ ID NO: 2553 - RNA, 21 nt, synthetic construct
  source 1..21: mol_type = other RNA
ctttctacaaaggtgaacatt

SEQ ID NO: 2554 - RNA, 19 nt, synthetic construct
  source 1..19: mol_type = other RNA
tcgatacttgtatttttca

SEQ ID NO: 2555 - RNA, 19 nt, synthetic construct
  source 1..19: mol_type = other RNA
ctacaaaggtgaactcaga

SEQ ID NO: 2556 - RNA, 19 nt, synthetic construct
  source 1..19: mol_type = other RNA
atggaagaaaagcagaaca

SEQ ID NO: 2557 - RNA, 19 nt, synthetic construct
  source 1..19: mol_type = other RNA
ctttctacaaaggtgaaca

SEQ ID NO: 2558 - RNA, 21 nt, synthetic construct
  source 1..21: mol_type = other RNA
tacaaactctgtacttccatt

SEQ ID NO: 2559 - RNA, 21 nt, synthetic construct
  source 1..21: mol_type = other RNA
tgtacttcctggaatcgaatt

SEQ ID NO: 2560 - RNA, 21 nt, synthetic construct
  source 1..21: mol_type = other RNA
tacttcctggaatcgataatt

SEQ ID NO: 2561 - RNA, 21 nt, synthetic construct
  source 1..21: mol_type = other RNA
gaatcgatacttgtatttatt

SEQ ID NO: 2562 - RNA, 21 nt, synthetic construct
  source 1..21: mol_type = other RNA
ttctagtaccaagttacgatt

SEQ ID NO: 2563 - RNA, 21 nt, synthetic construct
  source 1..21: mol_type = other RNA
agttacgtgcaccaaattatt

SEQ ID NO: 2564 - RNA, 21 nt, synthetic construct
  source 1..21: mol_type = other RNA
ttacgtgcaccaaattatatt

SEQ ID NO: 2565 - RNA, 21 nt, synthetic construct
  source 1..21: mol_type = other RNA
aaaatctactaaaaagtcatt

SEQ ID NO: 2566 - RNA, 21 nt, synthetic construct
  source 1..21: mol_type = other RNA
atctactaaaaagtctctatt

SEQ ID NO: 2567 - RNA, 21 nt, synthetic construct
  source 1..21: mol_type = other RNA
ctagatattgggagaaacatt

SEQ ID NO: 2568 - RNA, 21 nt, synthetic construct
  source 1..21: mol_type = other RNA
cattggatcttctcattgatt

SEQ ID NO: 2569 - RNA, 21 nt, synthetic construct
  source 1..21: mol_type = other RNA
ttggatcttctcattggaatt

SEQ ID NO: 2570 - DNA, 21 bp, synthetic construct
  source 1..21: mol_type = other DNA
  misc_feature 1..8: note = RNA
  misc_feature 9: note = DNA
  misc_feature 10..21: note = RNA
atacagagtggtgttacgatt

SEQ ID NO: 2571 - RNA, 21 nt, synthetic construct
  source 1..21: mol_type = other RNA
agtttaaagttgcctaagatt

SEQ ID NO: 2572 - RNA, 21 nt, synthetic construct
  source 1..21: mol_type = other RNA
tttaaagttgcctaagaaatt

SEQ ID NO: 2573 - RNA, 21 nt, synthetic construct
  source 1..21: mol_type = other RNA
tggattgctttttagcaaatt

SEQ ID NO: 2574 - DNA, 21 bp, synthetic construct
  source 1..21: mol_type = other DNA
  misc_feature 1..8: note = RNA
  misc_feature 9: note = DNA
  misc_feature 10..21: note = RNA
aaataaagttctcttagcatt

SEQ ID NO: 2575 - RNA, 19 nt, synthetic construct
  source 1..19: mol_type = other RNA
tacaaactctgtacttcca

SEQ ID NO: 2576 - RNA, 19 nt, synthetic construct
  source 1..19: mol_type = other RNA
tgtacttcctggaatcgaa

SEQ ID NO: 2577 - RNA, 19 nt, synthetic construct
  source 1..19: mol_type = other RNA
tacttcctggaatcgataa

SEQ ID NO: 2578 - RNA, 19 nt, synthetic construct
  source 1..19: mol_type = other RNA
gaatcgatacttgtattta

SEQ ID NO: 2579 - RNA, 19 nt, synthetic construct
  source 1..19: mol_type = other RNA
ttctagtaccaagttacga

SEQ ID NO: 2580 - RNA, 19 nt, synthetic construct
  source 1..19: mol_type = other RNA
agttacgtgcaccaaatta

SEQ ID NO: 2581 - RNA, 19 nt, synthetic construct
  source 1..19: mol_type = other RNA
ttacgtgcaccaaattata

SEQ ID NO: 2582 - RNA, 19 nt, synthetic construct
  source 1..19: mol_type = other RNA
aaaatctactaaaaagtca

SEQ ID NO: 2583 - RNA, 19 nt, synthetic construct
  source 1..19: mol_type = other RNA
atctactaaaaagtctcta

SEQ ID NO: 2584 - RNA, 19 nt, synthetic construct
  source 1..19: mol_type = other RNA
ctagatattgggagaaaca

SEQ ID NO: 2585 - RNA, 19 nt, synthetic construct
  source 1..19: mol_type = other RNA
cattggatcttctcattga

SEQ ID NO: 2586 - RNA, 19 nt, synthetic construct
  source 1..19: mol_type = other RNA
ttggatcttctcattggaa

SEQ ID NO: 2587 - DNA, 19 bp, synthetic construct
  source 1..19: mol_type = other DNA
  misc_feature 1..8: note = RNA
  misc_feature 9: note = DNA
  misc_feature 10..19: note = RNA
atacagagtggtgttacga

SEQ ID NO: 2588 - RNA, 19 nt, synthetic construct
  source 1..19: mol_type = other RNA
agtttaaagttgcctaaga

SEQ ID NO: 2589 - RNA, 19 nt, synthetic construct
  source 1..19: mol_type = other RNA
tttaaagttgcctaagaaa

SEQ ID NO: 2590 - RNA, 19 nt, synthetic construct
  source 1..19: mol_type = other RNA
tggattgctttttagcaaa

SEQ ID NO: 2591 - DNA, 19 bp, synthetic construct
  source 1..19: mol_type = other DNA
  misc_feature 1..8: note = RNA
  misc_feature 9: note = DNA
  misc_feature 10..19: note = RNA
aaataaagttctcttagca

SEQ ID NO: 2592 - RNA, 21 nt, synthetic construct
  source 1..21: mol_type = other RNA
gtatctccagaatgttatatt

SEQ ID NO: 2593 - RNA, 21 nt, synthetic construct
  source 1..21: mol_type = other RNA
acttcctggaatcgatacatt

SEQ ID NO: 2594 - RNA, 21 nt, synthetic construct
  source 1..21: mol_type = other RNA
cttcctggaatcgatactatt

SEQ ID NO: 2595 - RNA, 21 nt, synthetic construct
  source 1..21: mol_type = other RNA
ctggaatcgatacttgtaatt

SEQ ID NO: 2596 - RNA, 21 nt, synthetic construct
  source 1..21: mol_type = other RNA
ggaatcgatacttgtattatt

SEQ ID NO: 2597 - RNA, 21 nt, synthetic construct
  source 1..21: mol_type = other RNA
gatgctttctacaaaggtatt

SEQ ID NO: 2598 - RNA, 21 nt, synthetic construct
  source 1..21: mol_type = other RNA
agaaaagcagaacggtgaatt

SEQ ID NO: 2599 - RNA, 21 nt, synthetic construct
  source 1..21: mol_type = other RNA
aagcagaacggtgaaagtatt

SEQ ID NO: 2600 - RNA, 21 nt, synthetic construct
  source 1..21: mol_type = other RNA
agtgggagatacattggaatt

SEQ ID NO: 2601 - RNA, 21 nt, synthetic construct
  source 1..21: mol_type = other RNA
tgggagatacattggatcatt

SEQ ID NO: 2602 - RNA, 19 nt, synthetic construct
  source 1..19: mol_type = other RNA
gtatctccagaatgttata

SEQ ID NO: 2603 - RNA, 19 nt, synthetic construct
  source 1..19: mol_type = other RNA
acttcctggaatcgataca

SEQ ID NO: 2604 - RNA, 19 nt, synthetic construct
  source 1..19: mol_type = other RNA
cttcctggaatcgatacta

SEQ ID NO: 2605 - RNA, 19 nt, synthetic construct
  source 1..19: mol_type = other RNA
ctggaatcgatacttgtaa

SEQ ID NO: 2606 - RNA, 19 nt, synthetic construct
  source 1..19: mol_type = other RNA
ggaatcgatacttgtatta

SEQ ID NO: 2607 - RNA, 19 nt, synthetic construct
  source 1..19: mol_type = other RNA
gatgctttctacaaaggta

SEQ ID NO: 2608 - RNA, 19 nt, synthetic construct
  source 1..19: mol_type = other RNA
agaaaagcagaacggtgaa

SEQ ID NO: 2609 - RNA, 19 nt, synthetic construct
  source 1..19: mol_type = other RNA
aagcagaacggtgaaagta

SEQ ID NO: 2610 - RNA, 19 nt, synthetic construct
  source 1..19: mol_type = other RNA
agtgggagatacattggaa

SEQ ID NO: 2611 - RNA, 19 nt, synthetic construct
  source 1..19: mol_type = other RNA
tgggagatacattggatca

SEQ ID NO: 2612 - RNA, 21 nt, synthetic construct
  source 1..21: mol_type = other RNA
tgaaaaatacaagtatcgatt

SEQ ID NO: 2613 - RNA, 21 nt, synthetic construct
  source 1..21: mol_type = other RNA
tctgagttcacctttgtagtt

SEQ ID NO: 2614 - RNA, 21 nt, synthetic construct
  source 1..21: mol_type = other RNA
tgttctgcttttcttccattt

SEQ ID NO: 2615 - RNA, 21 nt, synthetic construct
  source 1..21: mol_type = other RNA
tgttcacctttgtagaaagtt

SEQ ID NO: 2616 - RNA, 19 nt, synthetic construct
  source 1..19: mol_type = other RNA
tgaaaaatacaagtatcga

SEQ ID NO: 2617 - RNA, 19 nt, synthetic construct
  source 1..19: mol_type = other RNA
tctgagttcacctttgtag

SEQ ID NO: 2618 - RNA, 19 nt, synthetic construct
  source 1..19: mol_type = other RNA
tgttctgcttttcttccat

SEQ ID NO: 2619 - RNA, 19 nt, synthetic construct
  source 1..19: mol_type = other RNA
tgttcacctttgtagaaag

SEQ ID NO: 2620 - RNA, 21 nt, synthetic construct
  source 1..21: mol_type = other RNA
tggaagtacagagtttgtatt

SEQ ID NO: 2621 - RNA, 21 nt, synthetic construct
  source 1..21: mol_type = other RNA
ttcgattccaggaagtacatt

SEQ ID NO: 2622 - RNA, 21 nt, synthetic construct
  source 1..21: mol_type = other RNA
ttatcgattccaggaagtatt

SEQ ID NO: 2623 - RNA, 21 nt, synthetic construct
  source 1..21: mol_type = other RNA
taaatacaagtatcgattctt

SEQ ID NO: 2624 - RNA, 21 nt, synthetic construct
  source 1..21: mol_type = other RNA
tcgtaacttggtactagaatt

SEQ ID NO: 2625 - RNA, 21 nt, synthetic construct
  source 1..21: mol_type = other RNA
taatttggtgcacgtaacttt

SEQ ID NO: 2626 - RNA, 21 nt, synthetic construct
  source 1..21: mol_type = other RNA
tataatttggtgcacgtaatt

SEQ ID NO: 2627 - RNA, 21 nt, synthetic construct
  source 1..21: mol_type = other RNA
tgactttttagtagatttttt

SEQ ID NO: 2628 - RNA, 21 nt, synthetic construct
  source 1..21: mol_type = other RNA
tagagactttttagtagattt

SEQ ID NO: 2629 - RNA, 21 nt, synthetic construct
  source 1..21: mol_type = other RNA
tgtttctcccaatatctagtt

SEQ ID NO: 2630 - RNA, 21 nt, synthetic construct
  source 1..21: mol_type = other RNA
tcaatgagaagatccaatgtt

SEQ ID NO: 2631 - RNA, 21 nt, synthetic construct
  source 1..21: mol_type = other RNA
ttccaatgagaagatccaatt

SEQ ID NO: 2632 - RNA, 21 nt, synthetic construct
  source 1..21: mol_type = other RNA
tcgtaacaccactctgtattt

SEQ ID NO: 2633 - RNA, 21 nt, synthetic construct
  source 1..21: mol_type = other RNA
tcttaggcaactttaaacttt

SEQ ID NO: 2634 - RNA, 21 nt, synthetic construct
  source 1..21: mol_type = other RNA
tttcttaggcaactttaaatt

SEQ ID NO: 2635 - RNA, 21 nt, synthetic construct
  source 1..21: mol_type = other RNA
tttgctaaaaagcaatccatt

SEQ ID NO: 2636 - RNA, 21 nt, synthetic construct
  source 1..21: mol_type = other RNA
tgctaagagaactttattttt

SEQ ID NO: 2637 - RNA, 19 nt, synthetic construct
  source 1..19: mol_type = other RNA
tggaagtacagagtttgta

SEQ ID NO: 2638 - RNA, 19 nt, synthetic construct
  source 1..19: mol_type = other RNA
ttcgattccaggaagtaca

SEQ ID NO: 2639 - RNA, 19 nt, synthetic construct
  source 1..19: mol_type = other RNA
ttatcgattccaggaagta

SEQ ID NO: 2640 - RNA, 19 nt, synthetic construct
  source 1..19: mol_type = other RNA
taaatacaagtatcgattc

SEQ ID NO: 2641 - RNA, 19 nt, synthetic construct
  source 1..19: mol_type = other RNA
tcgtaacttggtactagaa

SEQ ID NO: 2642 - RNA, 19 nt, synthetic construct
  source 1..19: mol_type = other RNA
taatttggtgcacgtaact

SEQ ID NO: 2643 - RNA, 19 nt, synthetic construct
  source 1..19: mol_type = other RNA
tataatttggtgcacgtaa

SEQ ID NO: 2644 - RNA, 19 nt, synthetic construct
  source 1..19: mol_type = other RNA
tgactttttagtagatttt

SEQ ID NO: 2645 - RNA, 19 nt, synthetic construct
  source 1..19: mol_type = other RNA
tagagactttttagtagat

SEQ ID NO: 2646 - RNA, 19 nt, synthetic construct
  source 1..19: mol_type = other RNA
tgtttctcccaatatctag

SEQ ID NO: 2647 - RNA, 19 nt, synthetic construct
  source 1..19: mol_type = other RNA
tcaatgagaagatccaatg

SEQ ID NO: 2648 - RNA, 19 nt, synthetic construct
  source 1..19: mol_type = other RNA
ttccaatgagaagatccaa

SEQ ID NO: 2649 - RNA, 19 nt, synthetic construct
  source 1..19: mol_type = other RNA
tcgtaacaccactctgtat

SEQ ID NO: 2650 - RNA, 19 nt, synthetic construct
  source 1..19: mol_type = other RNA
tcttaggcaactttaaact

SEQ ID NO: 2651 - RNA, 19 nt, synthetic construct
  source 1..19: mol_type = other RNA
tttcttaggcaactttaaa

SEQ ID NO: 2652 - RNA, 19 nt, synthetic construct
  source 1..19: mol_type = other RNA
tttgctaaaaagcaatcca

SEQ ID NO: 2653 - RNA, 19 nt, synthetic construct
  source 1..19: mol_type = other RNA
tgctaagagaactttattt

SEQ ID NO: 2654 - RNA, 21 nt, synthetic construct
  source 1..21: mol_type = other RNA
tataacattctggagatactt

SEQ ID NO: 2655 - RNA, 21 nt, synthetic construct
  source 1..21: mol_type = other RNA
tgtatcgattccaggaagttt

SEQ ID NO: 2656 - RNA, 21 nt, synthetic construct
  source 1..21: mol_type = other RNA
tagtatcgattccaggaagtt

SEQ ID NO: 2657 - RNA, 21 nt, synthetic construct
  source 1..21: mol_type = other RNA
ttacaagtatcgattccagtt

SEQ ID NO: 2658 - RNA, 21 nt, synthetic construct
  source 1..21: mol_type = other RNA
taatacaagtatcgattcctt

SEQ ID NO: 2659 - RNA, 21 nt, synthetic construct
  source 1..21: mol_type = other RNA
tacctttgtagaaagcatctt

SEQ ID NO: 2660 - RNA, 21 nt, synthetic construct
  source 1..21: mol_type = other RNA
ttcaccgttctgcttttcttt

SEQ ID NO: 2661 - RNA, 21 nt, synthetic construct
  source 1..21: mol_type = other RNA
tactttcaccgttctgctttt

SEQ ID NO: 2662 - RNA, 21 nt, synthetic construct
  source 1..21: mol_type = other RNA
ttccaatgtatctcccacttt

SEQ ID NO: 2663 - RNA, 21 nt, synthetic construct
  source 1..21: mol_type = other RNA
tgatccaatgtatctcccatt

SEQ ID NO: 2664 - RNA, 19 nt, synthetic construct
  source 1..19: mol_type = other RNA
tataacattctggagatac

SEQ ID NO: 2665 - RNA, 19 nt, synthetic construct
  source 1..19: mol_type = other RNA
tgtatcgattccaggaagt

SEQ ID NO: 2666 - RNA, 19 nt, synthetic construct
  source 1..19: mol_type = other RNA
tagtatcgattccaggaag

SEQ ID NO: 2667 - RNA, 19 nt, synthetic construct
  source 1..19: mol_type = other RNA
ttacaagtatcgattccag

SEQ ID NO: 2668 - RNA, 19 nt, synthetic construct
  source 1..19: mol_type = other RNA
taatacaagtatcgattcc

SEQ ID NO: 2669 - RNA, 19 nt, synthetic construct
  source 1..19: mol_type = other RNA
tacctttgtagaaagcatc

SEQ ID NO: 2670 - RNA, 19 nt, synthetic construct
  source 1..19: mol_type = other RNA
ttcaccgttctgcttttct

SEQ ID NO: 2671 - RNA, 19 nt, synthetic construct
  source 1..19: mol_type = other RNA
tactttcaccgttctgctt

SEQ ID NO: 2672 - RNA, 19 nt, synthetic construct
  source 1..19: mol_type = other RNA
ttccaatgtatctcccact

SEQ ID NO: 2673 - RNA, 19 nt, synthetic construct
  source 1..19: mol_type = other RNA
tgatccaatgtatctccca

SEQ ID NO: 2674 - RNA, 21 nt, synthetic construct
  source 1..21: mol_type = other RNA
ctacaaaggtgaactcagatt

SEQ ID NO: 2675 - RNA, 21 nt, synthetic construct
  source 1..21: mol_type = other RNA
agcaatataaactccaaaatt

SEQ ID NO: 2676 - RNA, 21 nt, synthetic construct
  source 1..21: mol_type = other RNA
cttcctggaatcgatactatt

SEQ ID NO: 2677 - RNA, 21 nt, synthetic construct
  source 1..21: mol_type = other RNA
ttcctggaatcgatacttatt

SEQ ID NO: 2678 - RNA, 21 nt, synthetic construct
  source 1..21: mol_type = other RNA
tcctggaatcgatacttgatt

SEQ ID NO: 2679 - RNA, 21 nt, synthetic construct
  source 1..21: mol_type = other RNA
cctggaatcgatacttgtatt

SEQ ID NO: 2680 - RNA, 21 nt, synthetic construct
  source 1..21: mol_type = other RNA
ttgtatttttctagtaccatt

SEQ ID NO: 2681 - RNA, 21 nt, synthetic construct
  source 1..21: mol_type = other RNA
tctacaaaggtgaactcaatt

SEQ ID NO: 2682 - RNA, 21 nt, synthetic construct
  source 1..21: mol_type = other RNA
caaaggtgaactcaggctatt

SEQ ID NO: 2683 - RNA, 21 nt, synthetic construct
  source 1..21: mol_type = other RNA
gaagaaaagcagaacggtatt

SEQ ID NO: 2684 - RNA, 21 nt, synthetic construct
  source 1..21: mol_type = other RNA
aagaaaagcagaacggtgatt

SEQ ID NO: 2685 - RNA, 21 nt, synthetic construct
  source 1..21: mol_type = other RNA
gaaaagcagaacggtgaaatt

SEQ ID NO: 2686 - RNA, 21 nt, synthetic construct
  source 1..21: mol_type = other RNA
cagaacggtgaaagtgggatt

SEQ ID NO: 2687 - skipped

SEQ ID NO: 2688 - RNA, 19 nt, synthetic construct
  source 1..19: mol_type = other RNA
ctacaaaggtgaactcagg

SEQ ID NO: 2689 - RNA, 19 nt, synthetic construct
  source 1..19: mol_type = other RNA
agcaatataaactccaaaa

SEQ ID NO: 2690 - RNA, 19 nt, synthetic construct
  source 1..19: mol_type = other RNA
cttcctggaatcgatactt

SEQ ID NO: 2691 - RNA, 19 nt, synthetic construct
  source 1..19: mol_type = other RNA
ttcctggaatcgatacttg

SEQ ID NO: 2692 - RNA, 19 nt, synthetic construct
  source 1..19: mol_type = other RNA
tcctggaatcgatacttgt

SEQ ID NO: 2693 - RNA, 19 nt, synthetic construct
  source 1..19: mol_type = other RNA
cctggaatcgatacttgta

SEQ ID NO: 2694 - RNA, 19 nt, synthetic construct
  source 1..19: mol_type = other RNA
ttgtatttttctagtacca

SEQ ID NO: 2695 - RNA, 19 nt, synthetic construct
  source 1..19: mol_type = other RNA
tctacaaaggtgaactcag

SEQ ID NO: 2696 - RNA, 19 nt, synthetic construct
  source 1..19: mol_type = other RNA
caaaggtgaactcaggctg

SEQ ID NO: 2697 - RNA, 19 nt, synthetic construct
  source 1..19: mol_type = other RNA
gaagaaaagcagaacggtg

SEQ ID NO: 2698 - RNA, 19 nt, synthetic construct
  source 1..19: mol_type = other RNA
aagaaaagcagaacggtga

SEQ ID NO: 2699 - RNA, 19 nt, synthetic construct
  source 1..19: mol_type = other RNA
gaaaagcagaacggtgaaa

SEQ ID NO: 2700 - RNA, 19 nt, synthetic construct
  source 1..19: mol_type = other RNA
cagaacggtgaaagtggga

SEQ ID NO: 2701 - RNA, 21 nt, synthetic construct
  source 1..21: mol_type = other RNA
tctacaaaggtgaactcaatt

SEQ ID NO: 2702 - RNA, 21 nt, synthetic construct
  source 1..21: mol_type = other RNA
tctacaaaggtgaactcaatt

SEQ ID NO: 2703 - RNA, 21 nt, synthetic construct
  source 1..21: mol_type = other RNA
tctacaaaggtgaactcaatt

SEQ ID NO: 2704 - RNA, 21 nt, synthetic construct
  source 1..21: mol_type = other RNA
tctacaaaggtgaactcaatt

SEQ ID NO: 2705 - RNA, 21 nt, synthetic construct
  source 1..21: mol_type = other RNA
tctacaaaggtgaactcaatt

SEQ ID NO: 2706 - RNA, 21 nt, synthetic construct
  source 1..21: mol_type = other RNA
tctacaaaggtgaactcaatt

SEQ ID NO: 2707 - RNA, 21 nt, synthetic construct
  source 1..21: mol_type = other RNA
tctacaaaggtgaactcaatt

SEQ ID NO: 2708 - RNA, 21 nt, synthetic construct
  source 1..21: mol_type = other RNA
tctacaaaggtgaactcaatt

SEQ ID NO: 2709 - RNA, 21 nt, synthetic construct
  source 1..21: mol_type = other RNA
tctacaaaggtgaactcaatt

SEQ ID NO: 2710 - RNA, 21 nt, synthetic construct
  source 1..21: mol_type = other RNA
gaagaaaagcagaacggtatt

SEQ ID NO: 2711 - RNA, 21 nt, synthetic construct
  source 1..21: mol_type = other RNA
gaagaaaagcagaacggtatt

SEQ ID NO: 2712 - RNA, 21 nt, synthetic construct
  source 1..21: mol_type = other RNA
gaagaaaagcagaacggtatt

SEQ ID NO: 2713 - RNA, 21 nt, synthetic construct
  source 1..21: mol_type = other RNA
gaagaaaagcagaacggtatt

SEQ ID NO: 2714 - RNA, 21 nt, synthetic construct
  source 1..21: mol_type = other RNA
gaagaaaagcagaacggtatt

SEQ ID NO: 2715 - RNA, 21 nt, synthetic construct
  source 1..21: mol_type = other RNA
gaagaaaagcagaacggtatt

SEQ ID NO: 2716 - RNA, 21 nt, synthetic construct
  source 1..21: mol_type = other RNA
gaagaaaagcagaacggtatt

SEQ ID NO: 2717 - RNA, 21 nt, synthetic construct
  source 1..21: mol_type = other RNA
gaagaaaagcagaacggtatt

SEQ ID NO: 2718 - RNA, 21 nt, synthetic construct
  source 1..21: mol_type = other RNA
gaagaaaagcagaacggtatt

SEQ ID NO: 2719 - skipped

SEQ ID NO: 2720 - RNA, 19 nt, synthetic construct
  source 1..19: mol_type = other RNA
tctacaaaggtgaactcaa

SEQ ID NO: 2721 - RNA, 19 nt, synthetic construct
  source 1..19: mol_type = other RNA
tctacaaaggtgaactcaa

SEQ ID NO: 2722 - RNA, 19 nt, synthetic construct
  source 1..19: mol_type = other RNA
tctacaaaggtgaactcaa

SEQ ID NO: 2723 - RNA, 19 nt, synthetic construct
  source 1..19: mol_type = other RNA
tctacaaaggtgaactcaa

SEQ ID NO: 2724 - RNA, 19 nt, synthetic construct
  source 1..19: mol_type = other RNA
tctacaaaggtgaactcaa

SEQ ID NO: 2725 - RNA, 19 nt, synthetic construct
  source 1..19: mol_type = other RNA
tctacaaaggtgaactcaa

SEQ ID NO: 2726 - RNA, 19 nt, synthetic construct
  source 1..19: mol_type = other RNA
tctacaaaggtgaactcaa

SEQ ID NO: 2727 - RNA, 19 nt, synthetic construct
  source 1..19: mol_type = other RNA
tctacaaaggtgaactcaa

SEQ ID NO: 2728 - RNA, 19 nt, synthetic construct
  source 1..19: mol_type = other RNA
tctacaaaggtgaactcaa

SEQ ID NO: 2729 - RNA, 19 nt, synthetic construct
  source 1..19: mol_type = other RNA
gaagaaaagcagaacggta

SEQ ID NO: 2730 - RNA, 19 nt, synthetic construct
  source 1..19: mol_type = other RNA
gaagaaaagcagaacggta

SEQ ID NO: 2731 - RNA, 19 nt, synthetic construct
  source 1..19: mol_type = other RNA
gaagaaaagcagaacggta

SEQ ID NO: 2732 - RNA, 19 nt, synthetic construct
  source 1..19: mol_type = other RNA
gaagaaaagcagaacggta

SEQ ID NO: 2733 - RNA, 19 nt, synthetic construct
  source 1..19: mol_type = other RNA
gaagaaaagcagaacggta

SEQ ID NO: 2734 - RNA, 19 nt, synthetic construct
  source 1..19: mol_type = other RNA
gaagaaaagcagaacggta

SEQ ID NO: 2735 - RNA, 19 nt, synthetic construct
  source 1..19: mol_type = other RNA
gaagaaaagcagaacggta

SEQ ID NO: 2736 - RNA, 19 nt, synthetic construct
  source 1..19: mol_type = other RNA
gaagaaaagcagaacggta

SEQ ID NO: 2737 - RNA, 19 nt, synthetic construct
  source 1..19: mol_type = other RNA
gaagaaaagcagaacggta

SEQ ID NO: 2738 - skipped

SEQ ID NO: 2739 - DNA, 21 bp, synthetic construct
  source 1..21: mol_type = other DNA
  misc_feature 1..8: note = RNA
  misc_feature 9: note = DNA
  misc_feature 10..21: note = RNA
tcctggaatcgatacttgatt

SEQ ID NO: 2740 - RNA, 21 nt, synthetic construct
  source 1..21: mol_type = other RNA
tcctggaatcgatacttgatt

SEQ ID NO: 2741 - RNA, 21 nt, synthetic construct
  source 1..21: mol_type = other RNA
cctggaatcgatacttgtatt

SEQ ID NO: 2742 - RNA, 21 nt, synthetic construct
  source 1..21: mol_type = other RNA
cctggaatcgatacttgtatt

SEQ ID NO: 2743 - RNA, 21 nt, synthetic construct
  source 1..21: mol_type = other RNA
aagaaaagcagaacggtgatt

SEQ ID NO: 2744 - RNA, 21 nt, synthetic construct
  source 1..21: mol_type = other RNA
aagaaaagcagaacggtgatt

SEQ ID NO: 2745 - DNA, 21 bp, synthetic construct
  source 1..21: mol_type = other DNA
  misc_feature 1..8: note = RNA
  misc_feature 9: note = DNA
  misc_feature 10..21: note = RNA
cagaacggtgaaagtgggatt

SEQ ID NO: 2746 - RNA, 21 nt, synthetic construct
  source 1..21: mol_type = other RNA
cagaacggtgaaagtgggatt

SEQ ID NO: 2747 - skipped

SEQ ID NO: 2748 - DNA, 19 bp, synthetic construct
  source 1..19: mol_type = other DNA
  misc_feature 1..8: note = RNA
  misc_feature 9: note = DNA
  misc_feature 10..19: note = RNA
tcctggaatcgatacttga

SEQ ID NO: 2749 - RNA, 19 nt, synthetic construct
  source 1..19: mol_type = other RNA
tcctggaatcgatacttga

SEQ ID NO: 2750 - RNA, 19 nt, synthetic construct
  source 1..19: mol_type = other RNA
cctggaatcgatacttgta

SEQ ID NO: 2751 - RNA, 19 nt, synthetic construct
  source 1..19: mol_type = other RNA
cctggaatcgatacttgta

SEQ ID NO: 2752 - RNA, 19 nt, synthetic construct
  source 1..19: mol_type = other RNA
aagaaaagcagaacggtga

SEQ ID NO: 2753 - RNA, 19 nt, synthetic construct
  source 1..19: mol_type = other RNA
aagaaaagcagaacggtga

SEQ ID NO: 2754 - DNA, 19 bp, synthetic construct
  source 1..19: mol_type = other DNA
  misc_feature 1..8: note = RNA
  misc_feature 9: note = DNA
  misc_feature 10..19: note = RNA
cagaacggtgaaagtggga

SEQ ID NO: 2755 - RNA, 19 nt, synthetic construct
  source 1..19: mol_type = other RNA
cagaacggtgaaagtggga

SEQ ID NO: 2756 - RNA, 21 nt, synthetic construct
  source 1..21: mol_type = other RNA
tctacaaaggtgaactcaatt

SEQ ID NO: 2757 - RNA, 21 nt, synthetic construct
  source 1..21: mol_type = other RNA
gaagaaaagcagaacggtatt

SEQ ID NO: 2758 - RNA, 21 nt, synthetic construct
  source 1..21: mol_type = other RNA
atcgatacttgtatttttatt

SEQ ID NO: 2759 - RNA, 21 nt, synthetic construct
  source 1..21: mol_type = other RNA
agactcccagggcttttaatt

SEQ ID NO: 2760 - RNA, 21 nt, synthetic construct
  source 1..21: mol_type = other RNA
tgctttctacaaaggtgaatt

SEQ ID NO: 2761 - DNA, 21 bp, synthetic construct
  source 1..21: mol_type = other DNA
  misc_feature 1..8: note = RNA
  misc_feature 9: note = DNA
  misc_feature 10..21: note = RNA
tacaaaggtgaactcaggatt

SEQ ID NO: 2762 - RNA, 21 nt, synthetic construct
  source 1..21: mol_type = other RNA
agcagaacggtgaaagtgatt

SEQ ID NO: 2763 - skipped

SEQ ID NO: 2764 - RNA, 19 nt, synthetic construct
  source 1..19: mol_type = other RNA
tctacaaaggtgaactcaa

SEQ ID NO: 2765 - RNA, 19 nt, synthetic construct
  source 1..19: mol_type = other RNA
gaagaaaagcagaacggta

SEQ ID NO: 2766 - RNA, 19 nt, synthetic construct
  source 1..19: mol_type = other RNA
atcgatacttgtattttta

SEQ ID NO: 2767 - RNA, 19 nt, synthetic construct
  source 1..19: mol_type = other RNA
agactcccagggcttttaa

SEQ ID NO: 2768 - RNA, 19 nt, synthetic construct
  source 1..19: mol_type = other RNA
tgctttctacaaaggtgaa

SEQ ID NO: 2769 - DNA, 19 bp, synthetic construct
  source 1..19: mol_type = other DNA
  misc_feature 1..8: note = RNA
  misc_feature 9: note = DNA
  misc_feature 10..19: note = RNA
tacaaaggtgaactcagga

SEQ ID NO: 2770 - RNA, 19 nt, synthetic construct
  source 1..19: mol_type = other RNA
agcagaacggtgaaagtga

SEQ ID NO: 2771 - RNA, 21 nt, synthetic construct
  source 1..21: mol_type = other RNA
gaagaaaagcagaacggtatt

SEQ ID NO: 2772 - RNA, 21 nt, synthetic construct
  source 1..21: mol_type = other RNA
gaagaaaagcagaacggtatt

SEQ ID NO: 2773 - RNA, 21 nt, synthetic construct
  source 1..21: mol_type = other RNA
gaagaaaagcagaacggtatt

SEQ ID NO: 2774 - RNA, 21 nt, synthetic construct
  source 1..21: mol_type = other RNA
tctacaaaggtgaactcaatt

SEQ ID NO: 2775 - RNA, 21 nt, synthetic construct
  source 1..21: mol_type = other RNA
tctacaaaggtgaactcaatt

SEQ ID NO: 2776 - RNA, 21 nt, synthetic construct
  source 1..21: mol_type = other RNA
tctacaaaggtgaactcaatt

SEQ ID NO: 2777 - RNA, 21 nt, synthetic construct
  source 1..21: mol_type = other RNA
tctacaaaggtgaactcaatt

SEQ ID NO: 2778 - skipped

SEQ ID NO: 2779 - RNA, 19 nt, synthetic construct
  source 1..19: mol_type = other RNA
gaagaaaagcagaacggta

SEQ ID NO: 2780 - RNA, 19 nt, synthetic construct
  source 1..19: mol_type = other RNA
gaagaaaagcagaacggta

SEQ ID NO: 2781 - RNA, 19 nt, synthetic construct
  source 1..19: mol_type = other RNA
gaagaaaagcagaacggta

SEQ ID NO: 2782 - RNA, 19 nt, synthetic construct
  source 1..19: mol_type = other RNA
tctacaaaggtgaactcaa

SEQ ID NO: 2783 - RNA, 19 nt, synthetic construct
  source 1..19: mol_type = other RNA
tctacaaaggtgaactcaa

SEQ ID NO: 2784 - RNA, 19 nt, synthetic construct
  source 1..19: mol_type = other RNA
tctacaaaggtgaactcaa

SEQ ID NO: 2785 - RNA, 19 nt, synthetic construct
  source 1..19: mol_type = other RNA
tctacaaaggtgaactcaa

SEQ ID NO: 2786 - RNA, 21 nt, synthetic construct
  source 1..21: mol_type = other RNA
tggctagtgttaaattgcatt

SEQ ID NO: 2787 - RNA, 21 nt, synthetic construct
  source 1..21: mol_type = other RNA
ggctagtgttaaattgctatt

SEQ ID NO: 2788 - RNA, 21 nt, synthetic construct
  source 1..21: mol_type = other RNA
gctagtgttaaattgcttatt

SEQ ID NO: 2789 - RNA, 21 nt, synthetic construct
  source 1..21: mol_type = other RNA
cggtgttttaagaaagccatt

SEQ ID NO: 2790 - RNA, 21 nt, synthetic construct
  source 1..21: mol_type = other RNA
gtacttcctggaatcgatatt

SEQ ID NO: 2791 - RNA, 21 nt, synthetic construct
  source 1..21: mol_type = other RNA
caagttacgtgcaccaaaatt

SEQ ID NO: 2792 - RNA, 21 nt, synthetic construct
  source 1..21: mol_type = other RNA
aagttacgtgcaccaaatatt

SEQ ID NO: 2793 - RNA, 21 nt, synthetic construct
  source 1..21: mol_type = other RNA
gttacgtgcaccaaattaatt

SEQ ID NO: 2794 - RNA, 21 nt, synthetic construct
  source 1..21: mol_type = other RNA
atattttctcactgagacatt

SEQ ID NO: 2795 - RNA, 21 nt, synthetic construct
  source 1..21: mol_type = other RNA
gtctacaaaatctactaaatt

SEQ ID NO: 2796 - RNA, 21 nt, synthetic construct
  source 1..21: mol_type = other RNA
agtcttttcggtatgatgatt

SEQ ID NO: 2797 - RNA, 21 nt, synthetic construct
  source 1..21: mol_type = other RNA
ggctagatattgggagaaatt

SEQ ID NO: 2798 - RNA, 21 nt, synthetic construct
  source 1..21: mol_type = other RNA
agatattgggagaaacaaatt

SEQ ID NO: 2799 - RNA, 21 nt, synthetic construct
  source 1..21: mol_type = other RNA
gatacattggatcttctcatt

SEQ ID NO: 2800 - RNA, 21 nt, synthetic construct
  source 1..21: mol_type = other RNA
tcttctcattggagaggaatt

SEQ ID NO: 2801 - RNA, 21 nt, synthetic construct
  source 1..21: mol_type = other RNA
ctcattggagaggataaaatt

SEQ ID NO: 2802 - RNA, 21 nt, synthetic construct
  source 1..21: mol_type = other RNA
ggataaagaagcaggaacatt

SEQ ID NO: 2803 - RNA, 21 nt, synthetic construct
  source 1..21: mol_type = other RNA
agagacagttatgcggatatt

SEQ ID NO: 2804 - RNA, 21 nt, synthetic construct
  source 1..21: mol_type = other RNA
agacagttatgcggattcatt

SEQ ID NO: 2805 - RNA, 21 nt, synthetic construct
  source 1..21: mol_type = other RNA
cagttatgcggattctctatt

SEQ ID NO: 2806 - RNA, 21 nt, synthetic construct
  source 1..21: mol_type = other RNA
ttatgcggattctcttgaatt

SEQ ID NO: 2807 - RNA, 21 nt, synthetic construct
  source 1..21: mol_type = other RNA
gcggattctcttgaaaaaatt

SEQ ID NO: 2808 - RNA, 21 nt, synthetic construct
  source 1..21: mol_type = other RNA
agtgaaaaatacagagtgatt

SEQ ID NO: 2809 - RNA, 21 nt, synthetic construct
  source 1..21: mol_type = other RNA
ggcggtggaaaagtttaaatt

SEQ ID NO: 2810 - RNA, 21 nt, synthetic construct
  source 1..21: mol_type = other RNA
gcggtggaaaagtttaaaatt

SEQ ID NO: 2811 - DNA, 21 bp, synthetic construct
  source 1..21: mol_type = other DNA
  misc_feature 1..8: note = RNA
  misc_feature 9: note = DNA
  misc_feature 10..21: note = RNA
gtttaaagttgcctaagaatt

SEQ ID NO: 2812 - RNA, 21 nt, synthetic construct
  source 1..21: mol_type = other RNA
agctgctttctagtggtaatt

SEQ ID NO: 2813 - skipped

SEQ ID NO: 2814 - RNA, 19 nt, synthetic construct
  source 1..19: mol_type = other RNA
tggctagtgttaaattgca

SEQ ID NO: 2815 - RNA, 19 nt, synthetic construct
  source 1..19: mol_type = other RNA
ggctagtgttaaattgcta

SEQ ID NO: 2816 - RNA, 19 nt, synthetic construct
  source 1..19: mol_type = other RNA
gctagtgttaaattgctta

SEQ ID NO: 2817 - RNA, 19 nt, synthetic construct
  source 1..19: mol_type = other RNA
cggtgttttaagaaagcca

SEQ ID NO: 2818 - RNA, 19 nt, synthetic construct
  source 1..19: mol_type = other RNA
gtacttcctggaatcgata

SEQ ID NO: 2819 - RNA, 19 nt, synthetic construct
  source 1..19: mol_type = other RNA
caagttacgtgcaccaaaa

SEQ ID NO: 2820 - RNA, 19 nt, synthetic construct
  source 1..19: mol_type = other RNA
aagttacgtgcaccaaata

SEQ ID NO: 2821 - RNA, 19 nt, synthetic construct
  source 1..19: mol_type = other RNA
gttacgtgcaccaaattaa

SEQ ID NO: 2822 - RNA, 19 nt, synthetic construct
  source 1..19: mol_type = other RNA
atattttctcactgagaca

SEQ ID NO: 2823 - RNA, 19 nt, synthetic construct
  source 1..19: mol_type = other RNA
gtctacaaaatctactaaa

SEQ ID NO: 2824 - RNA, 19 nt, synthetic construct
  source 1..19: mol_type = other RNA
agtcttttcggtatgatga

SEQ ID NO: 2825 - RNA, 19 nt, synthetic construct
  source 1..19: mol_type = other RNA
ggctagatattgggagaaa

SEQ ID NO: 2826 - RNA, 19 nt, synthetic construct
  source 1..19: mol_type = other RNA
agatattgggagaaacaaa

SEQ ID NO: 2827 - RNA, 19 nt, synthetic construct
  source 1..19: mol_type = other RNA
gatacattggatcttctca

SEQ ID NO: 2828 - RNA, 19 nt, synthetic construct
  source 1..19: mol_type = other RNA
tcttctcattggagaggaa

SEQ ID NO: 2829 - RNA, 19 nt, synthetic construct
  source 1..19: mol_type = other RNA
ctcattggagaggataaaa

SEQ ID NO: 2830 - RNA, 19 nt, synthetic construct
  source 1..19: mol_type = other RNA
ggataaagaagcaggaaca

SEQ ID NO: 2831 - RNA, 19 nt, synthetic construct
  source 1..19: mol_type = other RNA
agagacagttatgcggata

SEQ ID NO: 2832 - RNA, 19 nt, synthetic construct
  source 1..19: mol_type = other RNA
agacagttatgcggattca

SEQ ID NO: 2833 - RNA, 19 nt, synthetic construct
  source 1..19: mol_type = other RNA
cagttatgcggattctcta

SEQ ID NO: 2834 - RNA, 19 nt, synthetic construct
  source 1..19: mol_type = other RNA
ttatgcggattctcttgaa

SEQ ID NO: 2835 - RNA, 19 nt, synthetic construct
  source 1..19: mol_type = other RNA
gcggattctcttgaaaaaa

SEQ ID NO: 2836 - RNA, 19 nt, synthetic construct
  source 1..19: mol_type = other RNA
agtgaaaaatacagagtga

SEQ ID NO: 2837 - RNA, 19 nt, synthetic construct
  source 1..19: mol_type = other RNA
ggcggtggaaaagtttaaa

SEQ ID NO: 2838 - RNA, 19 nt, synthetic construct
  source 1..19: mol_type = other RNA
gcggtggaaaagtttaaaa

SEQ ID NO: 2839 - DNA, 19 bp, synthetic construct
  source 1..19: mol_type = other DNA
  misc_feature 1..8: note = RNA
  misc_feature 9: note = DNA
  misc_feature 10..19: note = RNA
gtttaaagttgcctaagaa

SEQ ID NO: 2840 - RNA, 19 nt, synthetic construct
  source 1..19: mol_type = other RNA
agctgctttctagtggtaa

SEQ ID NO: 2841 - RNA, 21 nt, synthetic construct
  source 1..21: mol_type = other RNA
cttcctggaatcgatactatt

SEQ ID NO: 2842 - RNA, 21 nt, synthetic construct
  source 1..21: mol_type = other RNA
cttcctggaatcgatactatt

SEQ ID NO: 2843 - RNA, 21 nt, synthetic construct
  source 1..21: mol_type = other RNA
cttcctggaatcgatactatt

SEQ ID NO: 2844 - RNA, 21 nt, synthetic construct
  source 1..21: mol_type = other RNA
cttcctggaatcgatactatt

SEQ ID NO: 2845 - RNA, 21 nt, synthetic construct
  source 1..21: mol_type = other RNA
cttcctggaatcgatactatt

SEQ ID NO: 2846 - RNA, 21 nt, synthetic construct
  source 1..21: mol_type = other RNA
cttcctggaatcgatactatt

SEQ ID NO: 2847 - RNA, 21 nt, synthetic construct
  source 1..21: mol_type = other RNA
cttcctggaatcgatactatt

SEQ ID NO: 2848 - skipped

SEQ ID NO: 2849 - RNA, 19 nt, synthetic construct
  source 1..19: mol_type = other RNA
cttcctggaatcgatacta

SEQ ID NO: 2850 - RNA, 19 nt, synthetic construct
  source 1..19: mol_type = other RNA
cttcctggaatcgatacta

SEQ ID NO: 2851 - RNA, 19 nt, synthetic construct
  source 1..19: mol_type = other RNA
cttcctggaatcgatacta

SEQ ID NO: 2852 - RNA, 19 nt, synthetic construct
  source 1..19: mol_type = other RNA
cttcctggaatcgatacta

SEQ ID NO: 2853 - RNA, 19 nt, synthetic construct
  source 1..19: mol_type = other RNA
cttcctggaatcgatacta

SEQ ID NO: 2854 - RNA, 19 nt, synthetic construct
  source 1..19: mol_type = other RNA
cttcctggaatcgatacta

SEQ ID NO: 2855 - RNA, 19 nt, synthetic construct
  source 1..19: mol_type = other RNA
cttcctggaatcgatacta

SEQ ID NO: 2856 - RNA, 21 nt, synthetic construct
  source 1..21: mol_type = other RNA
tctgagttcacctttgtagtt

SEQ ID NO: 2857 - RNA, 21 nt, synthetic construct
  source 1..21: mol_type = other RNA
ttttggagtttatattgcttt

SEQ ID NO: 2858 - RNA, 21 nt, synthetic construct
  source 1..21: mol_type = other RNA
tagtatcgattccaggaagtt

SEQ ID NO: 2859 - RNA, 21 nt, synthetic construct
  source 1..21: mol_type = other RNA
taagtatcgattccaggaatt

SEQ ID NO: 2860 - RNA, 21 nt, synthetic construct
  source 1..21: mol_type = other RNA
tcaagtatcgattccaggatt

SEQ ID NO: 2861 - RNA, 21 nt, synthetic construct
  source 1..21: mol_type = other RNA
tacaagtatcgattccaggtt

SEQ ID NO: 2862 - RNA, 21 nt, synthetic construct
  source 1..21: mol_type = other RNA
tggtactagaaaaatacaatt

SEQ ID NO: 2863 - RNA, 21 nt, synthetic construct
  source 1..21: mol_type = other RNA
ttgagttcacctttgtagatt

SEQ ID NO: 2864 - RNA, 21 nt, synthetic construct
  source 1..21: mol_type = other RNA
tagcctgagttcacctttgtt

SEQ ID NO: 2865 - RNA, 21 nt, synthetic construct
  source 1..21: mol_type = other RNA
taccgttctgcttttcttctt

SEQ ID NO: 2866 - RNA, 21 nt, synthetic construct
  source 1..21: mol_type = other RNA
tcaccgttctgcttttctttt

SEQ ID NO: 2867 - RNA, 21 nt, synthetic construct
  source 1..21: mol_type = other RNA
tttcaccgttctgcttttctt

SEQ ID NO: 2868 - RNA, 21 nt, synthetic construct
  source 1..21: mol_type = other RNA
tcccactttcaccgttctgtt

SEQ ID NO: 2869 - skipped

SEQ ID NO: 2870 - RNA, 19 nt, synthetic construct
  source 1..19: mol_type = other RNA
tctgagttcacctttgtag

SEQ ID NO: 2871 - RNA, 19 nt, synthetic construct
  source 1..19: mol_type = other RNA
ttttggagtttatattgct

SEQ ID NO: 2872 - RNA, 19 nt, synthetic construct
  source 1..19: mol_type = other RNA
tagtatcgattccaggaag

SEQ ID NO: 2873 - RNA, 19 nt, synthetic construct
  source 1..19: mol_type = other RNA
taagtatcgattccaggaa

SEQ ID NO: 2874 - RNA, 19 nt, synthetic construct
  source 1..19: mol_type = other RNA
tcaagtatcgattccagga

SEQ ID NO: 2875 - RNA, 19 nt, synthetic construct
  source 1..19: mol_type = other RNA
tacaagtatcgattccagg

SEQ ID NO: 2876 - RNA, 19 nt, synthetic construct
  source 1..19: mol_type = other RNA
tggtactagaaaaatacaa

SEQ ID NO: 2877 - RNA, 19 nt, synthetic construct
  source 1..19: mol_type = other RNA
ttgagttcacctttgtaga

SEQ ID NO: 2878 - RNA, 19 nt, synthetic construct
  source 1..19: mol_type = other RNA
tagcctgagttcacctttg

SEQ ID NO: 2879 - RNA, 19 nt, synthetic construct
  source 1..19: mol_type = other RNA
taccgttctgcttttcttc

SEQ ID NO: 2880 - RNA, 19 nt, synthetic construct
  source 1..19: mol_type = other RNA
tcaccgttctgcttttctt

SEQ ID NO: 2881 - RNA, 19 nt, synthetic construct
  source 1..19: mol_type = other RNA
tttcaccgttctgcttttc

SEQ ID NO: 2882 - RNA, 19 nt, synthetic construct
  source 1..19: mol_type = other RNA
tcccactttcaccgttctg

SEQ ID NO: 2883 - RNA, 21 nt, synthetic construct
  source 1..21: mol_type = other RNA
ttgagttcacctttgtagatt

SEQ ID NO: 2884 - RNA, 21 nt, synthetic construct
  source 1..21: mol_type = other RNA
ttgagttcacctttgtagatt

SEQ ID NO: 2885 - RNA, 21 nt, synthetic construct
  source 1..21: mol_type = other RNA
ttgagttcacctttgtagatt

SEQ ID NO: 2886 - RNA, 21 nt, synthetic construct
  source 1..21: mol_type = other RNA
ttgagttcacctttgtagatt

SEQ ID NO: 2887 - RNA, 21 nt, synthetic construct
  source 1..21: mol_type = other RNA
ttgagttcacctttgtagatt

SEQ ID NO: 2888 - RNA, 21 nt, synthetic construct
  source 1..21: mol_type = other RNA
ttgagttcacctttgtagatt

SEQ ID NO: 2889 - RNA, 21 nt, synthetic construct
  source 1..21: mol_type = other RNA
ttgagttcacctttgtagatt

SEQ ID NO: 2890 - RNA, 21 nt, synthetic construct
  source 1..21: mol_type = other RNA
ttgagttcacctttgtagatt

SEQ ID NO: 2891 - RNA, 21 nt, synthetic construct
  source 1..21: mol_type = other RNA
ttgagttcacctttgtagatt

SEQ ID NO: 2892 - RNA, 21 nt, synthetic construct
  source 1..21: mol_type = other RNA
taccgttctgcttttcttctt

SEQ ID NO: 2893 - RNA, 21 nt, synthetic construct
  source 1..21: mol_type = other RNA
taccgttctgcttttcttctt

SEQ ID NO: 2894 - RNA, 21 nt, synthetic construct
  source 1..21: mol_type = other RNA
taccgttctgcttttcttctt

SEQ ID NO: 2895 - RNA, 21 nt, synthetic construct
  source 1..21: mol_type = other RNA
taccgttctgcttttcttctt

SEQ ID NO: 2896 - RNA, 21 nt, synthetic construct
  source 1..21: mol_type = other RNA
taccgttctgcttttcttctt

SEQ ID NO: 2897 - RNA, 21 nt, synthetic construct
  source 1..21: mol_type = other RNA
taccgttctgcttttcttctt

SEQ ID NO: 2898 - RNA, 21 nt, synthetic construct
  source 1..21: mol_type = other RNA
taccgttctgcttttcttctt

SEQ ID NO: 2899 - RNA, 21 nt, synthetic construct
  source 1..21: mol_type = other RNA
taccgttctgcttttcttctt

SEQ ID NO: 2900 - RNA, 21 nt, synthetic construct
  source 1..21: mol_type = other RNA
taccgttctgcttttcttctt

SEQ ID NO: 2901 - skipped

SEQ ID NO: 2902 - RNA, 19 nt, synthetic construct
  source 1..19: mol_type = other RNA
ttgagttcacctttgtaga

SEQ ID NO: 2903 - RNA, 19 nt, synthetic construct
  source 1..19: mol_type = other RNA
ttgagttcacctttgtaga

SEQ ID NO: 2904 - RNA, 19 nt, synthetic construct
  source 1..19: mol_type = other RNA
ttgagttcacctttgtaga

SEQ ID NO: 2905 - RNA, 19 nt, synthetic construct
  source 1..19: mol_type = other RNA
ttgagttcacctttgtaga

SEQ ID NO: 2906 - RNA, 19 nt, synthetic construct
  source 1..19: mol_type = other RNA
ttgagttcacctttgtaga

SEQ ID NO: 2907 - RNA, 19 nt, synthetic construct
  source 1..19: mol_type = other RNA
ttgagttcacctttgtaga

SEQ ID NO: 2908 - RNA, 19 nt, synthetic construct
  source 1..19: mol_type = other RNA
ttgagttcacctttgtaga

SEQ ID NO: 2909 - RNA, 19 nt, synthetic construct
  source 1..19: mol_type = other RNA
ttgagttcacctttgtaga

SEQ ID NO: 2910 - RNA, 19 nt, synthetic construct
  source 1..19: mol_type = other RNA
ttgagttcacctttgtaga

SEQ ID NO: 2911 - RNA, 19 nt, synthetic construct
  source 1..19: mol_type = other RNA
taccgttctgcttttcttc

SEQ ID NO: 2912 - RNA, 19 nt, synthetic construct
  source 1..19: mol_type = other RNA
taccgttctgcttttcttc

SEQ ID NO: 2913 - RNA, 19 nt, synthetic construct
  source 1..19: mol_type = other RNA
taccgttctgcttttcttc

SEQ ID NO: 2914 - RNA, 19 nt, synthetic construct
  source 1..19: mol_type = other RNA
taccgttctgcttttcttc

SEQ ID NO: 2915 - RNA, 19 nt, synthetic construct
  source 1..19: mol_type = other RNA
taccgttctgcttttcttc

SEQ ID NO: 2916 - RNA, 19 nt, synthetic construct
  source 1..19: mol_type = other RNA
taccgttctgcttttcttc

SEQ ID NO: 2917 - RNA, 19 nt, synthetic construct
  source 1..19: mol_type = other RNA
taccgttctgcttttcttc

SEQ ID NO: 2918 - RNA, 19 nt, synthetic construct
  source 1..19: mol_type = other RNA
taccgttctgcttttcttc

SEQ ID NO: 2919 - RNA, 19 nt, synthetic construct
  source 1..19: mol_type = other RNA
taccgttctgcttttcttc

SEQ ID NO: 2920 - skipped

SEQ ID NO: 2921 - RNA, 21 nt, synthetic construct
  source 1..21: mol_type = other RNA
tcaagtatcgattccaggatt

SEQ ID NO: 2922 - RNA, 21 nt, synthetic construct
  source 1..21: mol_type = other RNA
tcaagtatcgattccaggatt

SEQ ID NO: 2923 - RNA, 21 nt, synthetic construct
  source 1..21: mol_type = other RNA
tacaagtatcgattccaggtt

SEQ ID NO: 2924 - RNA, 21 nt, synthetic construct
  source 1..21: mol_type = other RNA
tacaagtatcgattccaggtt

SEQ ID NO: 2925 - RNA, 21 nt, synthetic construct
  source 1..21: mol_type = other RNA
tcaccgttctgcttttctttt

SEQ ID NO: 2926 - RNA, 21 nt, synthetic construct
  source 1..21: mol_type = other RNA
tcaccgttctgcttttctttt

SEQ ID NO: 2927 - RNA, 21 nt, synthetic construct
  source 1..21: mol_type = other RNA
tcccactttcaccgttctgtt

SEQ ID NO: 2928 - RNA, 21 nt, synthetic construct
  source 1..21: mol_type = other RNA
tcccactttcaccgttctgtt

SEQ ID NO: 2929 - skipped

SEQ ID NO: 2930 - RNA, 19 nt, synthetic construct
  source 1..19: mol_type = other RNA
tcaagtatcgattccagga

SEQ ID NO: 2931 - RNA, 19 nt, synthetic construct
  source 1..19: mol_type = other RNA
tcaagtatcgattccagga

SEQ ID NO: 2932 - RNA, 19 nt, synthetic construct
  source 1..19: mol_type = other RNA
tacaagtatcgattccagg

SEQ ID NO: 2933 - RNA, 19 nt, synthetic construct
  source 1..19: mol_type = other RNA
tacaagtatcgattccagg

SEQ ID NO: 2934 - RNA, 19 nt, synthetic construct
  source 1..19: mol_type = other RNA
tcaccgttctgcttttctt

SEQ ID NO: 2935 - RNA, 19 nt, synthetic construct
  source 1..19: mol_type = other RNA
tcaccgttctgcttttctt

SEQ ID NO: 2936 - RNA, 19 nt, synthetic construct
  source 1..19: mol_type = other RNA
tcccactttcaccgttctg

SEQ ID NO: 2937 - RNA, 19 nt, synthetic construct
  source 1..19: mol_type = other RNA
tcccactttcaccgttctg

SEQ ID NO: 2938 - RNA, 21 nt, synthetic construct
  source 1..21: mol_type = other RNA
ttgagttcacctttgtagatt

SEQ ID NO: 2939 - RNA, 21 nt, synthetic construct
  source 1..21: mol_type = other RNA
taccgttctgcttttcttctt

SEQ ID NO: 2940 - RNA, 21 nt, synthetic construct
  source 1..21: mol_type = other RNA
taaaaatacaagtatcgattt

SEQ ID NO: 2941 - RNA, 21 nt, synthetic construct
  source 1..21: mol_type = other RNA
ttaaaagccctgggagtcttt

SEQ ID NO: 2942 - RNA, 21 nt, synthetic construct
  source 1..21: mol_type = other RNA
ttcacctttgtagaaagcatt

SEQ ID NO: 2943 - RNA, 21 nt, synthetic construct
  source 1..21: mol_type = other RNA
tcctgagttcacctttgtatt

SEQ ID NO: 2944 - RNA, 21 nt, synthetic construct
  source 1..21: mol_type = other RNA
tcactttcaccgttctgcttt

SEQ ID NO: 2945 - skipped

SEQ ID NO: 2946 - RNA, 19 nt, synthetic construct
  source 1..19: mol_type = other RNA
ttgagttcacctttgtaga

SEQ ID NO: 2947 - RNA, 19 nt, synthetic construct
  source 1..19: mol_type = other RNA
taccgttctgcttttcttc

SEQ ID NO: 2948 - RNA, 19 nt, synthetic construct
  source 1..19: mol_type = other RNA
taaaaatacaagtatcgat

SEQ ID NO: 2949 - RNA, 19 nt, synthetic construct
  source 1..19: mol_type = other RNA
ttaaaagccctgggagtct

SEQ ID NO: 2950 - RNA, 19 nt, synthetic construct
  source 1..19: mol_type = other RNA
ttcacctttgtagaaagca

SEQ ID NO: 2951 - RNA, 19 nt, synthetic construct
  source 1..19: mol_type = other RNA
tcctgagttcacctttgta

SEQ ID NO: 2952 - RNA, 19 nt, synthetic construct
  source 1..19: mol_type = other RNA
tcactttcaccgttctgct

SEQ ID NO: 2953 - RNA, 21 nt, synthetic construct
  source 1..21: mol_type = other RNA
taccgttctgcttttcttctt

SEQ ID NO: 2954 - RNA, 21 nt, synthetic construct
  source 1..21: mol_type = other RNA
taccgttctgcttttcttctt

SEQ ID NO: 2955 - RNA, 21 nt, synthetic construct
  source 1..21: mol_type = other RNA
taccgttctgcttttcttctt

SEQ ID NO: 2956 - RNA, 21 nt, synthetic construct
  source 1..21: mol_type = other RNA
ttgagttcacctttgtagatt

SEQ ID NO: 2957 - RNA, 21 nt, synthetic construct
  source 1..21: mol_type = other RNA
ttgagttcacctttgtagatt

SEQ ID NO: 2958 - RNA, 21 nt, synthetic construct
  source 1..21: mol_type = other RNA
ttgagttcacctttgtagatt

SEQ ID NO: 2959 - RNA, 21 nt, synthetic construct
  source 1..21: mol_type = other RNA
ttgagttcacctttgtagatt

SEQ ID NO: 2960 - skipped

SEQ ID NO: 2961 - RNA, 19 nt, synthetic construct
  source 1..19: mol_type = other RNA
taccgttctgcttttcttc

SEQ ID NO: 2962 - RNA, 19 nt, synthetic construct
  source 1..19: mol_type = other RNA
taccgttctgcttttcttc

SEQ ID NO: 2963 - RNA, 19 nt, synthetic construct
  source 1..19: mol_type = other RNA
taccgttctgcttttcttc

SEQ ID NO: 2964 - RNA, 19 nt, synthetic construct
  source 1..19: mol_type = other RNA
ttgagttcacctttgtaga

SEQ ID NO: 2965 - RNA, 19 nt, synthetic construct
  source 1..19: mol_type = other RNA
ttgagttcacctttgtaga

SEQ ID NO: 2966 - RNA, 19 nt, synthetic construct
  source 1..19: mol_type = other RNA
ttgagttcacctttgtaga

SEQ ID NO: 2967 - RNA, 19 nt, synthetic construct
  source 1..19: mol_type = other RNA
ttgagttcacctttgtaga

SEQ ID NO: 2968 - RNA, 21 nt, synthetic construct
  source 1..21: mol_type = other RNA
tgcaatttaacactagccatt

SEQ ID NO: 2969 - RNA, 21 nt, synthetic construct
  source 1..21: mol_type = other RNA
tagcaatttaacactagcctt

SEQ ID NO: 2970 - RNA, 21 nt, synthetic construct
  source 1..21: mol_type = other RNA
taagcaatttaacactagctt

SEQ ID NO: 2971 - RNA, 21 nt, synthetic construct
  source 1..21: mol_type = other RNA
tggctttcttaaaacaccgtt

SEQ ID NO: 2972 - RNA, 21 nt, synthetic construct
  source 1..21: mol_type = other RNA
tatcgattccaggaagtactt

SEQ ID NO: 2973 - RNA, 21 nt, synthetic construct
  source 1..21: mol_type = other RNA
ttttggtgcacgtaacttgtt

SEQ ID NO: 2974 - RNA, 21 nt, synthetic construct
  source 1..21: mol_type = other RNA
tatttggtgcacgtaactttt

SEQ ID NO: 2975 - RNA, 21 nt, synthetic construct
  source 1..21: mol_type = other RNA
ttaatttggtgcacgtaactt

SEQ ID NO: 2976 - RNA, 21 nt, synthetic construct
  source 1..21: mol_type = other RNA
tgtctcagtgagaaaatattt

SEQ ID NO: 2977 - RNA, 21 nt, synthetic construct
  source 1..21: mol_type = other RNA
tttagtagattttgtagactt

SEQ ID NO: 2978 - RNA, 21 nt, synthetic construct
  source 1..21: mol_type = other RNA
tcatcataccgaaaagacttt

SEQ ID NO: 2979 - RNA, 21 nt, synthetic construct
  source 1..21: mol_type = other RNA
tttctcccaatatctagcctt

SEQ ID NO: 2980 - RNA, 21 nt, synthetic construct
  source 1..21: mol_type = other RNA
tttgtttctcccaatatcttt

SEQ ID NO: 2981 - RNA, 21 nt, synthetic construct
  source 1..21: mol_type = other RNA
tgagaagatccaatgtatctt

SEQ ID NO: 2982 - RNA, 21 nt, synthetic construct
  source 1..21: mol_type = other RNA
ttcctctccaatgagaagatt

SEQ ID NO: 2983 - RNA, 21 nt, synthetic construct
  source 1..21: mol_type = other RNA
ttttatcctctccaatgagtt

SEQ ID NO: 2984 - RNA, 21 nt, synthetic construct
  source 1..21: mol_type = other RNA
tgttcctgcttctttatcctt

SEQ ID NO: 2985 - RNA, 21 nt, synthetic construct
  source 1..21: mol_type = other RNA
tatccgcataactgtctcttt

SEQ ID NO: 2986 - RNA, 21 nt, synthetic construct
  source 1..21: mol_type = other RNA
tgaatccgcataactgtcttt

SEQ ID NO: 2987 - RNA, 21 nt, synthetic construct
  source 1..21: mol_type = other RNA
tagagaatccgcataactgtt

SEQ ID NO: 2988 - RNA, 21 nt, synthetic construct
  source 1..21: mol_type = other RNA
ttcaagagaatccgcataatt

SEQ ID NO: 2989 - RNA, 21 nt, synthetic construct
  source 1..21: mol_type = other RNA
ttttttcaagagaatccgctt

SEQ ID NO: 2990 - RNA, 21 nt, synthetic construct
  source 1..21: mol_type = other RNA
tcactctgtatttttcacttt

SEQ ID NO: 2991 - RNA, 21 nt, synthetic construct
  source 1..21: mol_type = other RNA
tttaaacttttccaccgcctt

SEQ ID NO: 2992 - RNA, 21 nt, synthetic construct
  source 1..21: mol_type = other RNA
ttttaaacttttccaccgctt

SEQ ID NO: 2993 - RNA, 21 nt, synthetic construct
  source 1..21: mol_type = other RNA
ttcttaggcaactttaaactt

SEQ ID NO: 2994 - RNA, 21 nt, synthetic construct
  source 1..21: mol_type = other RNA
ttaccactagaaagcagcttt

SEQ ID NO: 2995 - skipped

SEQ ID NO: 2996 - RNA, 19 nt, synthetic construct
  source 1..19: mol_type = other RNA
tgcaatttaacactagcca

SEQ ID NO: 2997 - RNA, 19 nt, synthetic construct
  source 1..19: mol_type = other RNA
tagcaatttaacactagcc

SEQ ID NO: 2998 - RNA, 19 nt, synthetic construct
  source 1..19: mol_type = other RNA
taagcaatttaacactagc

SEQ ID NO: 2999 - RNA, 19 nt, synthetic construct
  source 1..19: mol_type = other RNA
tggctttcttaaaacaccg

SEQ ID NO: 3000 - RNA, 19 nt, synthetic construct
  source 1..19: mol_type = other RNA
tatcgattccaggaagtac

SEQ ID NO: 3001 - RNA, 19 nt, synthetic construct
  source 1..19: mol_type = other RNA
ttttggtgcacgtaacttg

SEQ ID NO: 3002 - RNA, 19 nt, synthetic construct
  source 1..19: mol_type = other RNA
tatttggtgcacgtaactt

SEQ ID NO: 3003 - RNA, 19 nt, synthetic construct
  source 1..19: mol_type = other RNA
ttaatttggtgcacgtaac

SEQ ID NO: 3004 - RNA, 19 nt, synthetic construct
  source 1..19: mol_type = other RNA
tgtctcagtgagaaaatat

SEQ ID NO: 3005 - RNA, 19 nt, synthetic construct
  source 1..19: mol_type = other RNA
tttagtagattttgtagac

SEQ ID NO: 3006 - RNA, 19 nt, synthetic construct
  source 1..19: mol_type = other RNA
tcatcataccgaaaagact

SEQ ID NO: 3007 - RNA, 19 nt, synthetic construct
  source 1..19: mol_type = other RNA
tttctcccaatatctagcc

SEQ ID NO: 3008 - RNA, 19 nt, synthetic construct
  source 1..19: mol_type = other RNA
tttgtttctcccaatatct

SEQ ID NO: 3009 - RNA, 19 nt, synthetic construct
  source 1..19: mol_type = other RNA
tgagaagatccaatgtatc

SEQ ID NO: 3010 - RNA, 19 nt, synthetic construct
  source 1..19: mol_type = other RNA
ttcctctccaatgagaaga

SEQ ID NO: 3011 - RNA, 19 nt, synthetic construct
  source 1..19: mol_type = other RNA
ttttatcctctccaatgag

SEQ ID NO: 3012 - RNA, 19 nt, synthetic construct
  source 1..19: mol_type = other RNA
tgttcctgcttctttatcc

SEQ ID NO: 3013 - RNA, 19 nt, synthetic construct
  source 1..19: mol_type = other RNA
tatccgcataactgtctct

SEQ ID NO: 3014 - RNA, 19 nt, synthetic construct
  source 1..19: mol_type = other RNA
tgaatccgcataactgtct

SEQ ID NO: 3015 - RNA, 19 nt, synthetic construct
  source 1..19: mol_type = other RNA
tagagaatccgcataactg

SEQ ID NO: 3016 - RNA, 19 nt, synthetic construct
  source 1..19: mol_type = other RNA
ttcaagagaatccgcataa

SEQ ID NO: 3017 - RNA, 19 nt, synthetic construct
  source 1..19: mol_type = other RNA
ttttttcaagagaatccgc

SEQ ID NO: 3018 - RNA, 19 nt, synthetic construct
  source 1..19: mol_type = other RNA
tcactctgtatttttcact

SEQ ID NO: 3019 - RNA, 19 nt, synthetic construct
  source 1..19: mol_type = other RNA
tttaaacttttccaccgcc

SEQ ID NO: 3020 - RNA, 19 nt, synthetic construct
  source 1..19: mol_type = other RNA
ttttaaacttttccaccgc

SEQ ID NO: 3021 - RNA, 19 nt, synthetic construct
  source 1..19: mol_type = other RNA
ttcttaggcaactttaaac

SEQ ID NO: 3022 - RNA, 19 nt, synthetic construct
  source 1..19: mol_type = other RNA
ttaccactagaaagcagct

SEQ ID NO: 3023 - RNA, 21 nt, synthetic construct
  source 1..21: mol_type = other RNA
tagtatcgattccaggaagtt

SEQ ID NO: 3024 - RNA, 21 nt, synthetic construct
  source 1..21: mol_type = other RNA
tagtatcgattccaggaagtt

SEQ ID NO: 3025 - RNA, 21 nt, synthetic construct
  source 1..21: mol_type = other RNA
tagtatcgattccaggaagtt

SEQ ID NO: 3026 - RNA, 21 nt, synthetic construct
  source 1..21: mol_type = other RNA
tagtatcgattccaggaagtt

SEQ ID NO: 3027 - RNA, 21 nt, synthetic construct
  source 1..21: mol_type = other RNA
tagtatcgattccaggaagtt

SEQ ID NO: 3028 - RNA, 21 nt, synthetic construct
  source 1..21: mol_type = other RNA
tagtatcgattccaggaagtt

SEQ ID NO: 3029 - RNA, 21 nt, synthetic construct
  source 1..21: mol_type = other RNA
tagtatcgattccaggaagtt

SEQ ID NO: 3030 - skipped

SEQ ID NO: 3031 - RNA, 19 nt, synthetic construct
  source 1..19: mol_type = other RNA
tagtatcgattccaggaag

SEQ ID NO: 3032 - RNA, 19 nt, synthetic construct
  source 1..19: mol_type = other RNA
tagtatcgattccaggaag

SEQ ID NO: 3033 - RNA, 19 nt, synthetic construct
  source 1..19: mol_type = other RNA
tagtatcgattccaggaag

SEQ ID NO: 3034 - RNA, 19 nt, synthetic construct
  source 1..19: mol_type = other RNA
tagtatcgattccaggaag

SEQ ID NO: 3035 - RNA, 19 nt, synthetic construct
  source 1..19: mol_type = other RNA
tagtatcgattccaggaag

SEQ ID NO: 3036 - RNA, 19 nt, synthetic construct
  source 1..19: mol_type = other RNA
tagtatcgattccaggaag

SEQ ID NO: 3037 - RNA, 19 nt, synthetic construct
  source 1..19: mol_type = other RNA
tagtatcgattccaggaag

SEQ ID NO: 3038 - RNA, 21 nt, synthetic construct
  source 1..21: mol_type = other RNA
  modified_base 1: mod_base = OTHER; note = 2'-O-methyl modified nucleoside with phosphorothioate linkage
  modified_base 2: mod_base = OTHER; note = 2'-O-methyl modified nucleoside with phosphorothioate linkage
  modified_base 3: mod_base = OTHER; note = 2'-fluoro modified nucleoside
  modified_base 4: mod_base = OTHER; note = 2'-O-methyl modified nucleoside
  modified_base 5: mod_base = OTHER; note = 2'-fluoro modified nucleoside
  modified_base 6: mod_base = OTHER; note = 2'-O-methyl modified nucleoside
  modified_base 7: mod_base = OTHER; note = 2'-fluoro modified nucleoside
  modified_base 8: mod_base = OTHER; note = 2'-O-methyl modified nucleoside
  modified_base 9: mod_base = OTHER; note = 2'-fluoro modified nucleoside
  modified_base 10: mod_base = OTHER; note = 2'-O-methyl modified nucleoside
  modified_base 11: mod_base = OTHER; note = 2'-fluoro modified nucleoside
  modified_base 12: mod_base = OTHER; note = 2'-O-methyl modified nucleoside
  modified_base 13: mod_base = OTHER; note = 2'-fluoro modified nucleoside
  modified_base 14: mod_base = OTHER; note = 2'-O-methyl modified nucleoside
  modified_base 15: mod_base = OTHER; note = 2'-O-methyl modified nucleoside
  modified_base 16: mod_base = OTHER; note = 2'-O-methyl modified nucleoside
  modified_base 17: mod_base = OTHER; note = 2'-fluoro modified nucleoside
  modified_base 18: mod_base = OTHER; note = 2'-O-methyl modified nucleoside
  modified_base 19: mod_base = OTHER; note = 2'-fluoro modified nucleoside with phosphorothioate linkage
  modified_base 20: mod_base = OTHER; note = 2'-O-methyl modified nucleoside with phosphorothioate linkage
  modified_base 21: mod_base = OTHER; note = 2'-O-methyl modified nucleoside
ctacaaaggtgaactcagatt

SEQ ID NO: 3039 - RNA, 21 nt, synthetic construct
  source 1..21: mol_type = other RNA
  modified_base 1: mod_base = OTHER; note = 2'-O-methyl modified nucleoside with phosphorothioate linkage
  modified_base 2: mod_base = OTHER; note = 2'-O-methyl modified nucleoside
  modified_base 3: mod_base = OTHER; note = 2'-O-methyl modified nucleoside
  modified_base 4: mod_base = OTHER; note = 2'-O-methyl modified nucleoside
  modified_base 5: mod_base = OTHER; note = 2'-fluoro modified nucleoside
  modified_base 6: mod_base = OTHER; note = 2'-O-methyl modified nucleoside
  modified_base 7: mod_base = OTHER; note = 2'-fluoro modified nucleoside
  modified_base 8: mod_base = OTHER; note = 2'-O-methyl modified nucleoside
  modified_base 9: mod_base = OTHER; note = 2'-fluoro modified nucleoside
  modified_base 10: mod_base = OTHER; note = 2'-fluoro modified nucleoside
  modified_base 11: mod_base = OTHER; note = 2'-O-methyl modified nucleoside
  modified_base 12: mod_base = OTHER; note = 2'-O-methyl modified nucleoside
  modified_base 13: mod_base = OTHER; note = 2'-O-methyl modified nucleoside
  modified_base 14: mod_base = OTHER; note = 2'-O-methyl modified nucleoside
  modified_base 15: mod_base = OTHER; note = 2'-O-methyl modified nucleoside
  modified_base 16: mod_base = OTHER; note = 2'-O-methyl modified nucleoside
  modified_base 17: mod_base = OTHER; note = 2'-O-methyl modified nucleoside
  modified_base 18: mod_base = OTHER; note = 2'-O-methyl modified nucleoside
  modified_base 19: mod_base = OTHER; note = 2'-O-methyl modified nucleoside with phosphorothioate linkage
  modified_base 20: mod_base = OTHER; note = 2'-O-methyl modified nucleoside with phosphorothioate linkage
  modified_base 21: mod_base = OTHER; note = 2'-O-methyl modified nucleoside
agcaatataaactccaaaatt

SEQ ID NO: 3040 - RNA, 21 nt, synthetic construct
  source 1..21: mol_type = other RNA
  modified_base 1: mod_base = OTHER; note = 2'-O-methyl modified nucleoside with phosphorothioate linkage
  modified_base 2: mod_base = OTHER; note = 2'-O-methyl modified nucleoside
  modified_base 3: mod_base = OTHER; note = 2'-O-methyl modified nucleoside
  modified_base 4: mod_base = OTHER; note = 2'-O-methyl modified nucleoside
  modified_base 5: mod_base = OTHER; note = 2'-O-methyl modified nucleoside
  modified_base 6: mod_base = OTHER; note = 2'-O-methyl modified nucleoside
  modified_base 7: mod_base = OTHER; note = 2'-fluoro modified nucleoside
  modified_base 8: mod_base = OTHER; note = 2'-fluoro modified nucleoside
  modified_base 9: mod_base = OTHER; note = 2'-fluoro modified nucleoside
  modified_base 10: mod_base = OTHER; note = 2'-fluoro modified nucleoside
  modified_base 11: mod_base = OTHER; note = 2'-O-methyl modified nucleoside
  modified_base 12: mod_base = OTHER; note = 2'-O-methyl modified nucleoside
  modified_base 13: mod_base = OTHER; note = 2'-O-methyl modified nucleoside
  modified_base 14: mod_base = OTHER; note = 2'-O-methyl modified nucleoside
  modified_base 15: mod_base = OTHER; note = 2'-O-methyl modified nucleoside
  modified_base 16: mod_base = OTHER; note = 2'-O-methyl modified nucleoside
  modified_base 17: mod_base = OTHER; note = 2'-O-methyl modified nucleoside
  modified_base 18: mod_base = OTHER; note = 2'-O-methyl modified nucleoside
  modified_base 19: mod_base = OTHER; note = 2'-O-methyl modified nucleoside with phosphorothioate linkage
  modified_base 20: mod_base = OTHER; note = 2'-O-methyl modified nucleoside with phosphorothioate linkage
  modified_base 21: mod_base = OTHER; note = 2'-O-methyl modified nucleoside
cttcctggaatcgatactatt

SEQ ID NO: 3041 - RNA, 21 nt, synthetic construct
  source 1..21: mol_type = other RNA
  modified_base 1: mod_base = OTHER; note = 2'-O-methyl modified nucleoside with phosphorothioate linkage
  modified_base 2: mod_base = OTHER; note = 2'-O-methyl modified nucleoside
  modified_base 3: mod_base = OTHER; note = 2'-O-methyl modified nucleoside
  modified_base 4: mod_base = OTHER; note = 2'-O-methyl modified nucleoside
  modified_base 5: mod_base = OTHER; note = 2'-O-methyl modified nucleoside
  modified_base 6: mod_base = OTHER; note = 2'-fluoro modified nucleoside
  modified_base 7: mod_base = OTHER; note = 2'-fluoro modified nucleoside
  modified_base 8: mod_base = OTHER; note = 2'-fluoro modified nucleoside
  modified_base 9: mod_base = OTHER; note = 2'-fluoro modified nucleoside
  modified_base 10: mod_base = OTHER; note = 2'-O-methyl modified nucleoside
  modified_base 11: mod_base = OTHER; note = 2'-O-methyl modified nucleoside
  modified_base 12: mod_base = OTHER; note = 2'-O-methyl modified nucleoside
  modified_base 13: mod_base = OTHER; note = 2'-O-methyl modified nucleoside
  modified_base 14: mod_base = OTHER; note = 2'-O-methyl modified nucleoside
  modified_base 15: mod_base = OTHER; note = 2'-O-methyl modified nucleoside
  modified_base 16: mod_base = OTHER; note = 2'-O-methyl modified nucleoside
  modified_base 17: mod_base = OTHER; note = 2'-O-methyl modified nucleoside
  modified_base 18: mod_base = OTHER; note = 2'-O-methyl modified nucleoside
  modified_base 19: mod_base = OTHER; note = 2'-O-methyl modified nucleoside with phosphorothioate linkage
  modified_base 20: mod_base = OTHER; note = 2'-O-methyl modified nucleoside with phosphorothioate linkage
  modified_base 21: mod_base = OTHER; note = 2'-O-methyl modified nucleoside
ttcctggaatcgatacttatt

SEQ ID NO: 3042 - DNA, 21 bp, synthetic construct
  source 1..21: mol_type = other DNA
  modified_base 1: mod_base = OTHER; note = 2'-O-methyl modified nucleoside with phosphorothioate linkage
  modified_base 2: mod_base = OTHER; note = 2'-O-methyl modified nucleoside
  modified_base 3: mod_base = OTHER; note = 2'-O-methyl modified nucleoside
  modified_base 4: mod_base = OTHER; note = 2'-O-methyl modified nucleoside
  modified_base 5: mod_base = OTHER; note = 2'-fluoro modified nucleoside
  modified_base 6: mod_base = OTHER; note = 2'-O-methyl modified nucleoside
  modified_base 7: mod_base = OTHER; note = 2'-fluoro modified nucleoside
  modified_base 8: mod_base = OTHER; note = 2'-fluoro modified nucleoside
  modified_base 10: mod_base = OTHER; note = 2'-fluoro modified nucleoside
  modified_base 11: mod_base = OTHER; note = 2'-O-methyl modified nucleoside
  modified_base 12: mod_base = OTHER; note = 2'-O-methyl modified nucleoside
  modified_base 13: mod_base = OTHER; note = 2'-O-methyl modified nucleoside
  modified_base 14: mod_base = OTHER; note = 2'-O-methyl modified nucleoside
  modified_base 15: mod_base = OTHER; note = 2'-O-methyl modified nucleoside
  modified_base 16: mod_base = OTHER; note = 2'-O-methyl modified nucleoside
  modified_base 17: mod_base = OTHER; note = 2'-O-methyl modified nucleoside
  modified_base 18: mod_base = OTHER; note = 2'-O-methyl modified nucleoside
  modified_base 19: mod_base = OTHER; note = 2'-O-methyl modified nucleoside with phosphorothioate linkage
  modified_base 20: mod_base = OTHER; note = 2'-O-methyl modified nucleoside with phosphorothioate linkage
  modified_base 21: mod_base = OTHER; note = 2'-O-methyl modified nucleoside
  misc_feature 1..8: note = RNA
  misc_feature 9: note = DNA
  misc_feature 10..21: note = RNA
tcctggaatcgatacttgatt

SEQ ID NO: 3043 - DNA, 21 bp, synthetic construct
  source 1..21: mol_type = other DNA
  modified_base 1: mod_base = OTHER; note = 2'-O-methyl modified nucleoside with phosphorothioate linkage
  modified_base 2: mod_base = OTHER; note = 2'-O-methyl modified nucleoside
  modified_base 3: mod_base = OTHER; note = 2'-O-methyl modified nucleoside
  modified_base 4: mod_base = OTHER; note = 2'-O-methyl modified nucleoside
  modified_base 5: mod_base = OTHER; note = 2'-fluoro modified nucleoside
  modified_base 6: mod_base = OTHER; note = 2'-O-methyl modified nucleoside
  modified_base 7: mod_base = OTHER; note = 2'-fluoro modified nucleoside
  modified_base 8: mod_base = OTHER; note = 2'-fluoro modified nucleoside
  modified_base 10: mod_base = OTHER; note = 2'-O-methyl modified nucleoside
  modified_base 11: mod_base = OTHER; note = 2'-O-methyl modified nucleoside
  modified_base 12: mod_base = OTHER; note = 2'-O-methyl modified nucleoside
  modified_base 13: mod_base = OTHER; note = 2'-O-methyl modified nucleoside
  modified_base 14: mod_base = OTHER; note = 2'-O-methyl modified nucleoside
  modified_base 15: mod_base = OTHER; note = 2'-O-methyl modified nucleoside
  modified_base 16: mod_base = OTHER; note = 2'-O-methyl modified nucleoside
  modified_base 17: mod_base = OTHER; note = 2'-O-methyl modified nucleoside
  modified_base 18: mod_base = OTHER; note = 2'-O-methyl modified nucleoside
  modified_base 19: mod_base = OTHER; note = 2'-O-methyl modified nucleoside with phosphorothioate linkage
  modified_base 20: mod_base = OTHER; note = 2'-O-methyl modified nucleoside with phosphorothioate linkage
  modified_base 21: mod_base = OTHER; note = 2'-O-methyl modified nucleoside
  misc_feature 1..8: note = RNA
  misc_feature 9: note = DNA
  misc_feature 10..21: note = RNA
cctggaatcgatacttgtatt

SEQ ID NO: 3044 - RNA, 21 nt, synthetic construct
  source 1..21: mol_type = other RNA
  modified_base 1: mod_base = OTHER; note = 2'-O-methyl modified nucleoside with phosphorothioate linkage
  modified_base 2: mod_base = OTHER; note = 2'-O-methyl modified nucleoside
  modified_base 3: mod_base = OTHER; note = 2'-O-methyl modified nucleoside
  modified_base 4: mod_base = OTHER; note = 2'-O-methyl modified nucleoside
  modified_base 5: mod_base = OTHER; note = 2'-O-methyl modified nucleoside
  modified_base 6: mod_base = OTHER; note = 2'-fluoro modified nucleoside
  modified_base 7: mod_base = OTHER; note = 2'-fluoro modified nucleoside
  modified_base 8: mod_base = OTHER; note = 2'-fluoro modified nucleoside
  modified_base 9: mod_base = OTHER; note = 2'-fluoro modified nucleoside
  modified_base 10: mod_base = OTHER; note = 2'-fluoro modified nucleoside
  modified_base 11: mod_base = OTHER; note = 2'-O-methyl modified nucleoside
  modified_base 12: mod_base = OTHER; note = 2'-O-methyl modified nucleoside
  modified_base 13: mod_base = OTHER; note = 2'-O-methyl modified nucleoside
  modified_base 14: mod_base = OTHER; note = 2'-O-methyl modified nucleoside
  modified_base 15: mod_base = OTHER; note = 2'-O-methyl modified nucleoside
  modified_base 16: mod_base = OTHER; note = 2'-O-methyl modified nucleoside
  modified_base 17: mod_base = OTHER; note = 2'-O-methyl modified nucleoside
  modified_base 18: mod_base = OTHER; note = 2'-O-methyl modified nucleoside
  modified_base 19: mod_base = OTHER; note = 2'-O-methyl modified nucleoside with phosphorothioate linkage
  modified_base 20: mod_base = OTHER; note = 2'-O-methyl modified nucleoside with phosphorothioate linkage
  modified_base 21: mod_base = OTHER; note = 2'-O-methyl modified nucleoside
ttgtatttttctagtaccatt

SEQ ID NO: 3045 - RNA, 21 nt, synthetic construct
  source 1..21: mol_type = other RNA
  modified_base 1: mod_base = OTHER; note = 2'-O-methyl modified nucleoside with phosphorothioate linkage
  modified_base 2: mod_base = OTHER; note = 2'-O-methyl modified nucleoside
  modified_base 3: mod_base = OTHER; note = 2'-O-methyl modified nucleoside
  modified_base 4: mod_base = OTHER; note = 2'-O-methyl modified nucleoside
  modified_base 5: mod_base = OTHER; note = 2'-O-methyl modified nucleoside
  modified_base 6: mod_base = OTHER; note = 2'-fluoro modified nucleoside
  modified_base 7: mod_base = OTHER; note = 2'-fluoro modified nucleoside
  modified_base 8: mod_base = OTHER; note = 2'-fluoro modified nucleoside
  modified_base 9: mod_base = OTHER; note = 2'-fluoro modified nucleoside
  modified_base 10: mod_base = OTHER; note = 2'-fluoro modified nucleoside
  modified_base 11: mod_base = OTHER; note = 2'-O-methyl modified nucleoside
  modified_base 12: mod_base = OTHER; note = 2'-O-methyl modified nucleoside
  modified_base 13: mod_base = OTHER; note = 2'-O-methyl modified nucleoside
  modified_base 14: mod_base = OTHER; note = 2'-O-methyl modified nucleoside
  modified_base 15: mod_base = OTHER; note = 2'-O-methyl modified nucleoside
  modified_base 16: mod_base = OTHER; note = 2'-O-methyl modified nucleoside
  modified_base 17: mod_base = OTHER; note = 2'-O-methyl modified nucleoside
  modified_base 18: mod_base = OTHER; note = 2'-O-methyl modified nucleoside
  modified_base 19: mod_base = OTHER; note = 2'-O-methyl modified nucleoside with phosphorothioate linkage
  modified_base 20: mod_base = OTHER; note = 2'-O-methyl modified nucleoside with phosphorothioate linkage
  modified_base 21: mod_base = OTHER; note = 2'-O-methyl modified nucleoside
tctacaaaggtgaactcaatt

SEQ ID NO: 3046 - RNA, 21 nt, synthetic construct
  source 1..21: mol_type = other RNA
  modified_base 1: mod_base = OTHER; note = 2'-O-methyl modified nucleoside with phosphorothioate linkage
  modified_base 2: mod_base = OTHER; note = 2'-O-methyl modified nucleoside
  modified_base 3: mod_base = OTHER; note = 2'-O-methyl modified nucleoside
  modified_base 4: mod_base = OTHER; note = 2'-O-methyl modified nucleoside
  modified_base 5: mod_base = OTHER; note = 2'-fluoro modified nucleoside
  modified_base 6: mod_base = OTHER; note = 2'-fluoro modified nucleoside
  modified_base 7: mod_base = OTHER; note = 2'-O-methyl modified nucleoside
  modified_base 8: mod_base = OTHER; note = 2'-fluoro modified nucleoside
  modified_base 9: mod_base = OTHER; note = 2'-fluoro modified nucleoside
  modified_base 10: mod_base = OTHER; note = 2'-O-methyl modified nucleoside
  modified_base 11: mod_base = OTHER; note = 2'-O-methyl modified nucleoside
  modified_base 12: mod_base = OTHER; note = 2'-O-methyl modified nucleoside
  modified_base 13: mod_base = OTHER; note = 2'-O-methyl modified nucleoside
  modified_base 14: mod_base = OTHER; note = 2'-O-methyl modified nucleoside
  modified_base 15: mod_base = OTHER; note = 2'-O-methyl modified nucleoside
  modified_base 16: mod_base = OTHER; note = 2'-O-methyl modified nucleoside
  modified_base 17: mod_base = OTHER; note = 2'-O-methyl modified nucleoside
  modified_base 18: mod_base = OTHER; note = 2'-O-methyl modified nucleoside
  modified_base 19: mod_base = OTHER; note = 2'-O-methyl modified nucleoside with phosphorothioate linkage
  modified_base 20: mod_base = OTHER; note = 2'-O-methyl modified nucleoside with phosphorothioate linkage
  modified_base 21: mod_base = OTHER; note = 2'-O-methyl modified nucleoside
caaaggtgaactcaggctatt

SEQ ID NO: 3047 - RNA, 21 nt, synthetic construct
  source 1..21: mol_type = other RNA
  modified_base 1: mod_base = OTHER; note = 2'-O-methyl modified nucleoside with phosphorothioate linkage
  modified_base 2: mod_base = OTHER; note = 2'-O-methyl modified nucleoside
  modified_base 3: mod_base = OTHER; note = 2'-O-methyl modified nucleoside
  modified_base 4: mod_base = OTHER; note = 2'-O-methyl modified nucleoside
  modified_base 5: mod_base = OTHER; note = 2'-fluoro modified nucleoside
  modified_base 6: mod_base = OTHER; note = 2'-fluoro modified nucleoside
  modified_base 7: mod_base = OTHER; note = 2'-fluoro modified nucleoside
  modified_base 8: mod_base = OTHER; note = 2'-fluoro modified nucleoside
  modified_base 9: mod_base = OTHER; note = 2'-fluoro modified nucleoside
  modified_base 10: mod_base = OTHER; note = 2'-O-methyl modified nucleoside
  modified_base 11: mod_base = OTHER; note = 2'-O-methyl modified nucleoside
  modified_base 12: mod_base = OTHER; note = 2'-O-methyl modified nucleoside
  modified_base 13: mod_base = OTHER; note = 2'-O-methyl modified nucleoside
  modified_base 14: mod_base = OTHER; note = 2'-O-methyl modified nucleoside
  modified_base 15: mod_base = OTHER; note = 2'-O-methyl modified nucleoside
  modified_base 16: mod_base = OTHER; note = 2'-O-methyl modified nucleoside
  modified_base 17: mod_base = OTHER; note = 2'-O-methyl modified nucleoside
  modified_base 18: mod_base = OTHER; note = 2'-O-methyl modified nucleoside
  modified_base 19: mod_base = OTHER; note = 2'-O-methyl modified nucleoside with phosphorothioate linkage
  modified_base 20: mod_base = OTHER; note = 2'-O-methyl modified nucleoside with phosphorothioate linkage
  modified_base 21: mod_base = OTHER; note = 2'-O-methyl modified nucleoside
gaagaaaagcagaacggtatt

SEQ ID NO: 3048 - DNA, 21 bp, synthetic construct
  source 1..21: mol_type = other DNA
  modified_base 1: mod_base = OTHER; note = 2'-O-methyl modified nucleoside with phosphorothioate linkage
  modified_base 2: mod_base = OTHER; note = 2'-O-methyl modified nucleoside
  modified_base 3: mod_base = OTHER; note = 2'-O-methyl modified nucleoside
  modified_base 4: mod_base = OTHER; note = 2'-O-methyl modified nucleoside
  modified_base 5: mod_base = OTHER; note = 2'-fluoro modified nucleoside
  modified_base 6: mod_base = OTHER; note = 2'-O-methyl modified nucleoside
  modified_base 7: mod_base = OTHER; note = 2'-fluoro modified nucleoside
  modified_base 8: mod_base = OTHER; note = 2'-fluoro modified nucleoside
  modified_base 10: mod_base = OTHER; note = 2'-O-methyl modified nucleoside
  modified_base 11: mod_base = OTHER; note = 2'-O-methyl modified nucleoside
  modified_base 12: mod_base = OTHER; note = 2'-O-methyl modified nucleoside
  modified_base 13: mod_base = OTHER; note = 2'-O-methyl modified nucleoside
  modified_base 14: mod_base = OTHER; note = 2'-O-methyl modified nucleoside
  modified_base 15: mod_base = OTHER; note = 2'-O-methyl modified nucleoside
  modified_base 16: mod_base = OTHER; note = 2'-O-methyl modified nucleoside
  modified_base 17: mod_base = OTHER; note = 2'-O-methyl modified nucleoside
  modified_base 18: mod_base = OTHER; note = 2'-O-methyl modified nucleoside
  modified_base 19: mod_base = OTHER; note = 2'-O-methyl modified nucleoside with phosphorothioate linkage
  modified_base 20: mod_base = OTHER; note = 2'-O-methyl modified nucleoside with phosphorothioate linkage
  modified_base 21: mod_base = OTHER; note = 2'-O-methyl modified nucleoside
  misc_feature 1..8: note = RNA
  misc_feature 9: note = DNA
  misc_feature 10..21: note = RNA
aagaaaagcagaacggtgatt

SEQ ID NO: 3049 - RNA, 21 nt, synthetic construct
  source 1..21: mol_type = other RNA
  modified_base 1: mod_base = OTHER; note = 2'-O-methyl modified nucleoside with phosphorothioate linkage
  modified_base 2: mod_base = OTHER; note = 2'-O-methyl modified nucleoside
  modified_base 3: mod_base = OTHER; note = 2'-O-methyl modified nucleoside
  modified_base 4: mod_base = OTHER; note = 2'-O-methyl modified nucleoside
  modified_base 5: mod_base = OTHER; note = 2'-fluoro modified nucleoside
  modified_base 6: mod_base = OTHER; note = 2'-fluoro modified nucleoside
  modified_base 7: mod_base = OTHER; note = 2'-O-methyl modified nucleoside
  modified_base 8: mod_base = OTHER; note = 2'-fluoro modified nucleoside
  modified_base 9: mod_base = OTHER; note = 2'-fluoro modified nucleoside
  modified_base 10: mod_base = OTHER; note = 2'-O-methyl modified nucleoside
  modified_base 11: mod_base = OTHER; note = 2'-fluoro modified nucleoside
  modified_base 12: mod_base = OTHER; note = 2'-O-methyl modified nucleoside
  modified_base 13: mod_base = OTHER; note = 2'-O-methyl modified nucleoside
  modified_base 14: mod_base = OTHER; note = 2'-O-methyl modified nucleoside
  modified_base 15: mod_base = OTHER; note = 2'-O-methyl modified nucleoside
  modified_base 16: mod_base = OTHER; note = 2'-O-methyl modified nucleoside
  modified_base 17: mod_base = OTHER; note = 2'-O-methyl modified nucleoside
  modified_base 18: mod_base = OTHER; note = 2'-O-methyl modified nucleoside
  modified_base 19: mod_base = OTHER; note = 2'-O-methyl modified nucleoside with phosphorothioate linkage
  modified_base 20: mod_base = OTHER; note = 2'-O-methyl modified nucleoside with phosphorothioate linkage
  modified_base 21: mod_base = OTHER; note = 2'-O-methyl modified nucleoside
gaaaagcagaacggtgaaatt

SEQ ID NO: 3050 - DNA, 21 bp, synthetic construct
  source 1..21: mol_type = other DNA
  modified_base 1: mod_base = OTHER; note = 2'-O-methyl modified nucleoside with phosphorothioate linkage
  modified_base 2: mod_base = OTHER; note = 2'-O-methyl modified nucleoside
  modified_base 3: mod_base = OTHER; note = 2'-O-methyl modified nucleoside
  modified_base 4: mod_base = OTHER; note = 2'-O-methyl modified nucleoside
  modified_base 5: mod_base = OTHER; note = 2'-fluoro modified nucleoside
  modified_base 6: mod_base = OTHER; note = 2'-O-methyl modified nucleoside
  modified_base 7: mod_base = OTHER; note = 2'-fluoro modified nucleoside
  modified_base 8: mod_base = OTHER; note = 2'-fluoro modified nucleoside
  modified_base 10: mod_base = OTHER; note = 2'-O-methyl modified nucleoside
  modified_base 11: mod_base = OTHER; note = 2'-O-methyl modified nucleoside
  modified_base 12: mod_base = OTHER; note = 2'-O-methyl modified nucleoside
  modified_base 13: mod_base = OTHER; note = 2'-O-methyl modified nucleoside
  modified_base 14: mod_base = OTHER; note = 2'-O-methyl modified nucleoside
  modified_base 15: mod_base = OTHER; note = 2'-O-methyl modified nucleoside
  modified_base 16: mod_base = OTHER; note = 2'-O-methyl modified nucleoside
  modified_base 17: mod_base = OTHER; note = 2'-O-methyl modified nucleoside
  modified_base 18: mod_base = OTHER; note = 2'-O-methyl modified nucleoside
  modified_base 19: mod_base = OTHER; note = 2'-O-methyl modified nucleoside with phosphorothioate linkage
  modified_base 20: mod_base = OTHER; note = 2'-O-methyl modified nucleoside with phosphorothioate linkage
  modified_base 21: mod_base = OTHER; note = 2'-O-methyl modified nucleoside
  misc_feature 1..8: note = RNA
  misc_feature 9: note = DNA
  misc_feature 10..21: note = RNA
cagaacggtgaaagtgggatt

SEQ ID NO: 3051 - RNA, 21 nt, synthetic construct
  source 1..21: mol_type = other RNA
  misc_feature 1: note = ETL17 moiety with phosphorothioate linkage
  modified_base 1: mod_base = OTHER; note = 2'-O-methyl modified nucleoside
  modified_base 2: mod_base = OTHER; note = 2'-O-methyl modified nucleoside
  modified_base 3: mod_base = OTHER; note = 2'-O-methyl modified nucleoside
  modified_base 4: mod_base = OTHER; note = 2'-O-methyl modified nucleoside
  modified_base 5: mod_base = OTHER; note = 2'-O-methyl modified nucleoside
  modified_base 6: mod_base = OTHER; note = 2'-fluoro modified nucleoside
  modified_base 7: mod_base = OTHER; note = 2'-fluoro modified nucleoside
  modified_base 8: mod_base = OTHER; note = 2'-fluoro modified nucleoside
  modified_base 9: mod_base = OTHER; note = 2'-fluoro modified nucleoside
  modified_base 10: mod_base = OTHER; note = 2'-fluoro modified nucleoside
  modified_base 11: mod_base = OTHER; note = 2'-O-methyl modified nucleoside
  modified_base 12: mod_base = OTHER; note = 2'-O-methyl modified nucleoside
  modified_base 13: mod_base = OTHER; note = 2'-O-methyl modified nucleoside
  modified_base 14: mod_base = OTHER; note = 2'-O-methyl modified nucleoside
  modified_base 15: mod_base = OTHER; note = 2'-O-methyl modified nucleoside
  modified_base 16: mod_base = OTHER; note = 2'-O-methyl modified nucleoside
  modified_base 17: mod_base = OTHER; note = 2'-O-methyl modified nucleoside
  modified_base 18: mod_base = OTHER; note = 2'-O-methyl modified nucleoside
  modified_base 19: mod_base = OTHER; note = 2'-O-methyl modified nucleoside with phosphorothioate linkage
  modified_base 20: mod_base = OTHER; note = 2'-O-methyl modified nucleoside with phosphorothioate linkage
  modified_base 21: mod_base = OTHER; note = 2'-O-methyl modified nucleoside
tctacaaaggtgaactcaatt

SEQ ID NO: 3052 - RNA, 21 nt, synthetic construct
  source 1..21: mol_type = other RNA
  misc_feature 1: note = ETL17 moiety with phosphorothioate linkage
  modified_base 1: mod_base = OTHER; note = 2'-O-methyl modified nucleoside
  modified_base 2: mod_base = OTHER; note = 2'-O-methyl modified nucleoside
  modified_base 3: mod_base = OTHER; note = 2'-O-methyl modified nucleoside
  modified_base 4: mod_base = OTHER; note = 2'-O-methyl modified nucleoside
  modified_base 5: mod_base = OTHER; note = 2'-O-methyl modified nucleoside
  modified_base 6: mod_base = OTHER; note = 2'-O-methyl modified nucleoside
  modified_base 7: mod_base = OTHER; note = 2'-fluoro modified nucleoside
  modified_base 8: mod_base = OTHER; note = 2'-fluoro modified nucleoside
  modified_base 9: mod_base = OTHER; note = 2'-fluoro modified nucleoside
  modified_base 10: mod_base = OTHER; note = 2'-fluoro modified nucleoside
  modified_base 11: mod_base = OTHER; note = 2'-O-methyl modified nucleoside
  modified_base 12: mod_base = OTHER; note = 2'-O-methyl modified nucleoside
  modified_base 13: mod_base = OTHER; note = 2'-O-methyl modified nucleoside
  modified_base 14: mod_base = OTHER; note = 2'-O-methyl modified nucleoside
  modified_base 15: mod_base = OTHER; note = 2'-O-methyl modified nucleoside
  modified_base 16: mod_base = OTHER; note = 2'-O-methyl modified nucleoside
  modified_base 17: mod_base = OTHER; note = 2'-O-methyl modified nucleoside
  modified_base 18: mod_base = OTHER; note = 2'-O-methyl modified nucleoside
  modified_base 19: mod_base = OTHER; note = 2'-O-methyl modified nucleoside with phosphorothioate linkage
  modified_base 20: mod_base = OTHER; note = 2'-O-methyl modified nucleoside with phosphorothioate linkage
  modified_base 21: mod_base = OTHER; note = 2'-O-methyl modified nucleoside
tctacaaaggtgaactcaatt

SEQ ID NO: 3053 - RNA, 21 nt, synthetic construct
  source 1..21: mol_type = other RNA
  misc_feature 1: note = ETL17 moiety with phosphorothioate linkage
  modified_base 1: mod_base = OTHER; note = 2'-O-methyl modified nucleoside
  modified_base 2: mod_base = OTHER; note = 2'-O-methyl modified nucleoside
  modified_base 3: mod_base = OTHER; note = 2'-O-methyl modified nucleoside
  modified_base 4: mod_base = OTHER; note = 2'-O-methyl modified nucleoside
  modified_base 5: mod_base = OTHER; note = 2'-O-methyl modified nucleoside
  modified_base 6: mod_base = OTHER; note = 2'-O-methyl modified nucleoside
  modified_base 7: mod_base = OTHER; note = 2'-fluoro modified nucleoside
  modified_base 8: mod_base = OTHER; note = 2'-fluoro modified nucleoside
  modified_base 9: mod_base = OTHER; note = 2'-fluoro modified nucleoside
  modified_base 10: mod_base = OTHER; note = 2'-fluoro modified nucleoside
  modified_base 11: mod_base = OTHER; note = 2'-O-methyl modified nucleoside
  modified_base 12: mod_base = OTHER; note = 2'-fluoro modified nucleoside
  modified_base 13: mod_base = OTHER; note = 2'-O-methyl modified nucleoside
  modified_base 14: mod_base = OTHER; note = 2'-O-methyl modified nucleoside
  modified_base 15: mod_base = OTHER; note = 2'-O-methyl modified nucleoside
  modified_base 16: mod_base = OTHER; note = 2'-O-methyl modified nucleoside
  modified_base 17: mod_base = OTHER; note = 2'-O-methyl modified nucleoside
  modified_base 18: mod_base = OTHER; note = 2'-O-methyl modified nucleoside
  modified_base 19: mod_base = OTHER; note = 2'-O-methyl modified nucleoside with phosphorothioate linkage
  modified_base 20: mod_base = OTHER; note = 2'-O-methyl modified nucleoside with phosphorothioate linkage
  modified_base 21: mod_base = OTHER; note = 2'-O-methyl modified nucleoside
tctacaaaggtgaactcaatt

SEQ ID NO: 3054 - RNA, 21 nt, synthetic construct
  source 1..21: mol_type = other RNA
  misc_feature 1: note = ETL17 moiety with phosphorothioate linkage
  modified_base 1: mod_base = OTHER; note = 2'-O-methyl modified nucleoside
  modified_base 2: mod_base = OTHER; note = 2'-O-methyl modified nucleoside
  modified_base 3: mod_base = OTHER; note = 2'-O-methyl modified nucleoside
  modified_base 4: mod_base = OTHER; note = 2'-O-methyl modified nucleoside
  modified_base 5: mod_base = OTHER; note = 2'-O-methyl modified nucleoside
  modified_base 6: mod_base = OTHER; note = 2'-fluoro modified nucleoside
  modified_base 7: mod_base = OTHER; note = 2'-fluoro modified nucleoside
  modified_base 8: mod_base = OTHER; note = 2'-fluoro modified nucleoside
  modified_base 9: mod_base = OTHER; note = 2'-fluoro modified nucleoside
  modified_base 10: mod_base = OTHER; note = 2'-fluoro modified nucleoside
  modified_base 11: mod_base = OTHER; note = 2'-O-methyl modified nucleoside
  modified_base 12: mod_base = OTHER; note = 2'-O-methyl modified nucleoside
  modified_base 13: mod_base = OTHER; note = 2'-O-methyl modified nucleoside
  modified_base 14: mod_base = OTHER; note = 2'-O-methyl modified nucleoside
  modified_base 15: mod_base = OTHER; note = 2'-O-methyl modified nucleoside
  modified_base 16: mod_base = OTHER; note = 2'-O-methyl modified nucleoside
  modified_base 17: mod_base = OTHER; note = 2'-O-methyl modified nucleoside
  modified_base 18: mod_base = OTHER; note = 2'-O-methyl modified nucleoside
  modified_base 19: mod_base = OTHER; note = 2'-O-methyl modified nucleoside with phosphorothioate linkage
  modified_base 20: mod_base = OTHER; note = 2'-O-methyl modified nucleoside with phosphorothioate linkage
  modified_base 21: mod_base = OTHER; note = 2'-O-methyl modified nucleoside
tctacaaaggtgaactcaatt

SEQ ID NO: 3055 - RNA, 21 nt, synthetic construct
  source 1..21: mol_type = other RNA
  misc_feature 1: note = ETL17 moiety with phosphorothioate linkage
  modified_base 1: mod_base = OTHER; note = 2'-O-methyl modified nucleoside
  modified_base 2: mod_base = OTHER; note = 2'-O-methyl modified nucleoside
  modified_base 3: mod_base = OTHER; note = 2'-O-methyl modified nucleoside
  modified_base 4: mod_base = OTHER; note = 2'-O-methyl modified nucleoside
  modified_base 5: mod_base = OTHER; note = 2'-O-methyl modified nucleoside
  modified_base 6: mod_base = OTHER; note = 2'-fluoro modified nucleoside
  modified_base 7: mod_base = OTHER; note = 2'-fluoro modified nucleoside
  modified_base 8: mod_base = OTHER; note = 2'-fluoro modified nucleoside
  modified_base 9: mod_base = OTHER; note = 2'-fluoro modified nucleoside
  modified_base 10: mod_base = OTHER; note = 2'-fluoro modified nucleoside
  modified_base 11: mod_base = OTHER; note = 2'-O-methyl modified nucleoside
  modified_base 12: mod_base = OTHER; note = 2'-O-methyl modified nucleoside
  modified_base 13: mod_base = OTHER; note = 2'-O-methyl modified nucleoside
  modified_base 14: mod_base = OTHER; note = 2'-O-methyl modified nucleoside
  modified_base 15: mod_base = OTHER; note = 2'-O-methyl modified nucleoside
  modified_base 16: mod_base = OTHER; note = 2'-O-methyl modified nucleoside
  modified_base 17: mod_base = OTHER; note = 2'-O-methyl modified nucleoside
  modified_base 18: mod_base = OTHER; note = 2'-O-methyl modified nucleoside
  modified_base 19: mod_base = OTHER; note = 2'-O-methyl modified nucleoside with phosphorothioate linkage
  modified_base 20: mod_base = OTHER; note = 2'-O-methyl modified nucleoside with phosphorothioate linkage
  modified_base 21: mod_base = OTHER; note = 2'-O-methyl modified nucleoside
tctacaaaggtgaactcaatt

SEQ ID NO: 3056 - RNA, 21 nt, synthetic construct
  source 1..21: mol_type = other RNA
  misc_feature 1: note = ETL17 moiety with phosphorothioate linkage
  modified_base 1: mod_base = OTHER; note = 2'-O-methyl modified nucleoside
  modified_base 2: mod_base = OTHER; note = 2'-O-methyl modified nucleoside
  modified_base 3: mod_base = OTHER; note = 2'-O-methyl modified nucleoside
  modified_base 4: mod_base = OTHER; note = 2'-O-methyl modified nucleoside
  modified_base 5: mod_base = OTHER; note = 2'-O-methyl modified nucleoside
  modified_base 6: mod_base = OTHER; note = 2'-fluoro modified nucleoside
  modified_base 7: mod_base = OTHER; note = 2'-fluoro modified nucleoside
  modified_base 8: mod_base = OTHER; note = 2'-fluoro modified nucleoside
  modified_base 9: mod_base = OTHER; note = 2'-fluoro modified nucleoside
  modified_base 10: mod_base = OTHER; note = 2'-fluoro modified nucleoside
  modified_base 11: mod_base = OTHER; note = 2'-O-methyl modified nucleoside
  modified_base 12: mod_base = OTHER; note = 2'-O-methyl modified nucleoside
  modified_base 13: mod_base = OTHER; note = 2'-O-methyl modified nucleoside
  modified_base 14: mod_base = OTHER; note = 2'-O-methyl modified nucleoside
  modified_base 15: mod_base = OTHER; note = 2'-O-methyl modified nucleoside
  modified_base 16: mod_base = OTHER; note = 2'-O-methyl modified nucleoside
  modified_base 17: mod_base = OTHER; note = 2'-O-methyl modified nucleoside
  modified_base 18: mod_base = OTHER; note = 2'-O-methyl modified nucleoside
  modified_base 19: mod_base = OTHER; note = 2'-O-methyl modified nucleoside with phosphorothioate linkage
  modified_base 20: mod_base = OTHER; note = 2'-O-methyl modified nucleoside with phosphorothioate linkage
  modified_base 21: mod_base = OTHER; note = 2'-O-methyl modified nucleoside
tctacaaaggtgaactcaatt

SEQ ID NO: 3057 - RNA, 21 nt, synthetic construct
  source 1..21: mol_type = other RNA
  misc_feature 1: note = ETL17 moiety with phosphorothioate linkage
  modified_base 1: mod_base = OTHER; note = 2'-O-methyl modified nucleoside
  modified_base 2: mod_base = OTHER; note = 2'-O-methyl modified nucleoside
  modified_base 3: mod_base = OTHER; note = 2'-O-methyl modified nucleoside
  modified_base 4: mod_base = OTHER; note = 2'-O-methyl modified nucleoside
  modified_base 5: mod_base = OTHER; note = 2'-O-methyl modified nucleoside
  modified_base 6: mod_base = OTHER; note = 2'-fluoro modified nucleoside
  modified_base 7: mod_base = OTHER; note = 2'-fluoro modified nucleoside
  modified_base 8: mod_base = OTHER; note = 2'-fluoro modified nucleoside
  modified_base 9: mod_base = OTHER; note = 2'-fluoro modified nucleoside
  modified_base 10: mod_base = OTHER; note = 2'-fluoro modified nucleoside
  modified_base 11: mod_base = OTHER; note = 2'-O-methyl modified nucleoside
  modified_base 12: mod_base = OTHER; note = 2'-O-methyl modified nucleoside
  modified_base 13: mod_base = OTHER; note = 2'-O-methyl modified nucleoside
  modified_base 14: mod_base = OTHER; note = 2'-O-methyl modified nucleoside
  modified_base 15: mod_base = OTHER; note = 2'-O-methyl modified nucleoside
  modified_base 16: mod_base = OTHER; note = 2'-O-methyl modified nucleoside
  modified_base 17: mod_base = OTHER; note = 2'-O-methyl modified nucleoside
  modified_base 18: mod_base = OTHER; note = 2'-O-methyl modified nucleoside
  modified_base 19: mod_base = OTHER; note = 2'-O-methyl modified nucleoside with phosphorothioate linkage
  modified_base 20: mod_base = OTHER; note = 2'-O-methyl modified nucleoside with phosphorothioate linkage
  modified_base 21: mod_base = OTHER; note = 2'-O-methyl modified nucleoside
tctacaaaggtgaactcaatt

SEQ ID NO: 3058 - RNA, 21 nt, synthetic construct
  source 1..21: mol_type = other RNA
  misc_feature 1: note = ETL17 moiety with phosphorothioate linkage
  modified_base 1: mod_base = OTHER; note = 2'-O-methyl modified nucleoside
  modified_base 2: mod_base = OTHER; note = 2'-O-methyl modified nucleoside
  modified_base 3: mod_base = OTHER; note = 2'-O-methyl modified nucleoside
  modified_base 4: mod_base = OTHER; note = 2'-O-methyl modified nucleoside
  modified_base 5: mod_base = OTHER; note = 2'-O-methyl modified nucleoside
  modified_base 6: mod_base = OTHER; note = 2'-fluoro modified nucleoside
  modified_base 7: mod_base = OTHER; note = 2'-fluoro modified nucleoside
  modified_base 8: mod_base = OTHER; note = 2'-fluoro modified nucleoside
  modified_base 9: mod_base = OTHER; note = 2'-fluoro modified nucleoside
  modified_base 10: mod_base = OTHER; note = 2'-fluoro modified nucleoside
  modified_base 11: mod_base = OTHER; note = 2'-O-methyl modified nucleoside
  modified_base 12: mod_base = OTHER; note = 2'-O-methyl modified nucleoside
  modified_base 13: mod_base = OTHER; note = 2'-O-methyl modified nucleoside
  modified_base 14: mod_base = OTHER; note = 2'-O-methyl modified nucleoside
  modified_base 15: mod_base = OTHER; note = 2'-O-methyl modified nucleoside
  modified_base 16: mod_base = OTHER; note = 2'-O-methyl modified nucleoside
  modified_base 17: mod_base = OTHER; note = 2'-O-methyl modified nucleoside
  modified_base 18: mod_base = OTHER; note = 2'-O-methyl modified nucleoside
  modified_base 19: mod_base = OTHER; note = 2'-O-methyl modified nucleoside with phosphorothioate linkage
  modified_base 20: mod_base = OTHER; note = 2'-O-methyl modified nucleoside with phosphorothioate linkage
  modified_base 21: mod_base = OTHER; note = 2'-O-methyl modified nucleoside
tctacaaaggtgaactcaatt

SEQ ID NO: 3059 - RNA, 21 nt, synthetic construct
  source 1..21: mol_type = other RNA
  misc_feature 1: note = ETL17 moiety with phosphorothioate linkage
  modified_base 1: mod_base = OTHER; note = 2'-O-methyl modified nucleoside
  modified_base 2: mod_base = OTHER; note = 2'-O-methyl modified nucleoside
  modified_base 3: mod_base = OTHER; note = 2'-O-methyl modified nucleoside
  modified_base 4: mod_base = OTHER; note = 2'-O-methyl modified nucleoside
  modified_base 5: mod_base = OTHER; note = 2'-O-methyl modified nucleoside
  modified_base 6: mod_base = OTHER; note = 2'-fluoro modified nucleoside
  modified_base 7: mod_base = OTHER; note = 2'-fluoro modified nucleoside
  modified_base 8: mod_base = OTHER; note = 2'-fluoro modified nucleoside
  modified_base 9: mod_base = OTHER; note = 2'-fluoro modified nucleoside
  modified_base 10: mod_base = OTHER; note = 2'-O-methyl modified nucleoside
  modified_base 11: mod_base = OTHER; note = 2'-O-methyl modified nucleoside
  modified_base 12: mod_base = OTHER; note = 2'-O-methyl modified nucleoside
  modified_base 13: mod_base = OTHER; note = 2'-O-methyl modified nucleoside
  modified_base 14: mod_base = OTHER; note = 2'-O-methyl modified nucleoside
  modified_base 15: mod_base = OTHER; note = 2'-O-methyl modified nucleoside
  modified_base 16: mod_base = OTHER; note = 2'-O-methyl modified nucleoside
  modified_base 17: mod_base = OTHER; note = 2'-O-methyl modified nucleoside
  modified_base 18: mod_base = OTHER; note = 2'-O-methyl modified nucleoside
  modified_base 19: mod_base = OTHER; note = 2'-O-methyl modified nucleoside with phosphorothioate linkage
  modified_base 20: mod_base = OTHER; note = 2'-O-methyl modified nucleoside with phosphorothioate linkage
  modified_base 21: mod_base = OTHER; note = 2'-O-methyl modified nucleoside
tctacaaaggtgaactcaatt

SEQ ID NO: 3060 - RNA, 21 nt, synthetic construct
  source 1..21: mol_type = other RNA
  misc_feature 1: note = ETL17 moiety with phosphorothioate linkage
  modified_base 1: mod_base = OTHER; note = 2'-O-methyl modified nucleoside
  modified_base 2: mod_base = OTHER; note = 2'-O-methyl modified nucleoside
  modified_base 3: mod_base = OTHER; note = 2'-O-methyl modified nucleoside
  modified_base 4: mod_base = OTHER; note = 2'-O-methyl modified nucleoside
  modified_base 5: mod_base = OTHER; note = 2'-fluoro modified nucleoside
  modified_base 6: mod_base = OTHER; note = 2'-fluoro modified nucleoside
  modified_base 7: mod_base = OTHER; note = 2'-fluoro modified nucleoside
  modified_base 8: mod_base = OTHER; note = 2'-fluoro modified nucleoside
  modified_base 9: mod_base = OTHER; note = 2'-fluoro modified nucleoside
  modified_base 10: mod_base = OTHER; note = 2'-O-methyl modified nucleoside
  modified_base 11: mod_base = OTHER; note = 2'-O-methyl modified nucleoside
  modified_base 12: mod_base = OTHER; note = 2'-O-methyl modified nucleoside
  modified_base 13: mod_base = OTHER; note = 2'-O-methyl modified nucleoside
  modified_base 14: mod_base = OTHER; note = 2'-O-methyl modified nucleoside
  modified_base 15: mod_base = OTHER; note = 2'-O-methyl modified nucleoside
  modified_base 16: mod_base = OTHER; note = 2'-O-methyl modified nucleoside
  modified_base 17: mod_base = OTHER; note = 2'-O-methyl modified nucleoside
  modified_base 18: mod_base = OTHER; note = 2'-O-methyl modified nucleoside
  modified_base 19: mod_base = OTHER; note = 2'-O-methyl modified nucleoside with phosphorothioate linkage
  modified_base 20: mod_base = OTHER; note = 2'-O-methyl modified nucleoside with phosphorothioate linkage
  modified_base 21: mod_base = OTHER; note = 2'-O-methyl modified nucleoside
gaagaaaagcagaacggtatt

SEQ ID NO: 3061 - RNA, 21 nt, synthetic construct
  source 1..21: mol_type = other RNA
  misc_feature 1: note = ETL17 moiety with phosphorothioate linkage
  modified_base 1: mod_base = OTHER; note = 2'-O-methyl modified nucleoside
  modified_base 2: mod_base = OTHER; note = 2'-O-methyl modified nucleoside
  modified_base 3: mod_base = OTHER; note = 2'-O-methyl modified nucleoside
  modified_base 4: mod_base = OTHER; note = 2'-O-methyl modified nucleoside
  modified_base 5: mod_base = OTHER; note = 2'-O-methyl modified nucleoside
  modified_base 6: mod_base = OTHER; note = 2'-fluoro modified nucleoside
  modified_base 7: mod_base = OTHER; note = 2'-fluoro modified nucleoside
  modified_base 8: mod_base = OTHER; note = 2'-fluoro modified nucleoside
  modified_base 9: mod_base = OTHER; note = 2'-fluoro modified nucleoside
  modified_base 10: mod_base = OTHER; note = 2'-O-methyl modified nucleoside
  modified_base 11: mod_base = OTHER; note = 2'-O-methyl modified nucleoside
  modified_base 12: mod_base = OTHER; note = 2'-O-methyl modified nucleoside
  modified_base 13: mod_base = OTHER; note = 2'-O-methyl modified nucleoside
  modified_base 14: mod_base = OTHER; note = 2'-O-methyl modified nucleoside
  modified_base 15: mod_base = OTHER; note = 2'-O-methyl modified nucleoside
  modified_base 16: mod_base = OTHER; note = 2'-O-methyl modified nucleoside
  modified_base 17: mod_base = OTHER; note = 2'-O-methyl modified nucleoside
  modified_base 18: mod_base = OTHER; note = 2'-O-methyl modified nucleoside
  modified_base 19: mod_base = OTHER; note = 2'-O-methyl modified nucleoside with phosphorothioate linkage
  modified_base 20: mod_base = OTHER; note = 2'-O-methyl modified nucleoside with phosphorothioate linkage
  modified_base 21: mod_base = OTHER; note = 2'-O-methyl modified nucleoside
gaagaaaagcagaacggtatt

SEQ ID NO: 3062 - RNA, 21 nt, synthetic construct
  source 1..21: mol_type = other RNA
  misc_feature 1: note = ETL17 moiety with phosphorothioate linkage
  modified_base 1: mod_base = OTHER; note = 2'-O-methyl modified nucleoside
  modified_base 2: mod_base = OTHER; note = 2'-O-methyl modified nucleoside
  modified_base 3: mod_base = OTHER; note = 2'-O-methyl modified nucleoside
  modified_base 4: mod_base = OTHER; note = 2'-O-methyl modified nucleoside
  modified_base 5: mod_base = OTHER; note = 2'-O-methyl modified nucleoside
  modified_base 6: mod_base = OTHER; note = 2'-fluoro modified nucleoside
  modified_base 7: mod_base = OTHER; note = 2'-fluoro modified nucleoside
  modified_base 8: mod_base = OTHER; note = 2'-fluoro modified nucleoside
  modified_base 9: mod_base = OTHER; note = 2'-fluoro modified nucleoside
  modified_base 10: mod_base = OTHER; note = 2'-O-methyl modified nucleoside
  modified_base 11: mod_base = OTHER; note = 2'-fluoro modified nucleoside
  modified_base 12: mod_base = OTHER; note = 2'-O-methyl modified nucleoside
  modified_base 13: mod_base = OTHER; note = 2'-O-methyl modified nucleoside
  modified_base 14: mod_base = OTHER; note = 2'-O-methyl modified nucleoside
  modified_base 15: mod_base = OTHER; note = 2'-O-methyl modified nucleoside
  modified_base 16: mod_base = OTHER; note = 2'-O-methyl modified nucleoside
  modified_base 17: mod_base = OTHER; note = 2'-O-methyl modified nucleoside
  modified_base 18: mod_base = OTHER; note = 2'-O-methyl modified nucleoside
  modified_base 19: mod_base = OTHER; note = 2'-O-methyl modified nucleoside with phosphorothioate linkage
  modified_base 20: mod_base = OTHER; note = 2'-O-methyl modified nucleoside with phosphorothioate linkage
  modified_base 21: mod_base = OTHER; note = 2'-O-methyl modified nucleoside
gaagaaaagcagaacggtatt

SEQ ID NO: 3063 - RNA, 21 nt, synthetic construct
  source 1..21: mol_type = other RNA
  misc_feature 1: note = ETL17 moiety with phosphorothioate linkage
  modified_base 1: mod_base = OTHER; note = 2'-O-methyl modified nucleoside
  modified_base 2: mod_base = OTHER; note = 2'-O-methyl modified nucleoside
  modified_base 3: mod_base = OTHER; note = 2'-O-methyl modified nucleoside
  modified_base 4: mod_base = OTHER; note = 2'-O-methyl modified nucleoside
  modified_base 5: mod_base = OTHER; note = 2'-fluoro modified nucleoside
  modified_base 6: mod_base = OTHER; note = 2'-fluoro modified nucleoside
  modified_base 7: mod_base = OTHER; note = 2'-fluoro modified nucleoside
  modified_base 8: mod_base = OTHER; note = 2'-fluoro modified nucleoside
  modified_base 9: mod_base = OTHER; note = 2'-fluoro modified nucleoside
  modified_base 10: mod_base = OTHER; note = 2'-O-methyl modified nucleoside
  modified_base 11: mod_base = OTHER; note = 2'-O-methyl modified nucleoside
  modified_base 12: mod_base = OTHER; note = 2'-O-methyl modified nucleoside
  modified_base 13: mod_base = OTHER; note = 2'-O-methyl modified nucleoside
  modified_base 14: mod_base = OTHER; note = 2'-O-methyl modified nucleoside
  modified_base 15: mod_base = OTHER; note = 2'-O-methyl modified nucleoside
  modified_base 16: mod_base = OTHER; note = 2'-O-methyl modified nucleoside
  modified_base 17: mod_base = OTHER; note = 2'-O-methyl modified nucleoside
  modified_base 18: mod_base = OTHER; note = 2'-O-methyl modified nucleoside
  modified_base 19: mod_base = OTHER; note = 2'-O-methyl modified nucleoside with phosphorothioate linkage
  modified_base 20: mod_base = OTHER; note = 2'-O-methyl modified nucleoside with phosphorothioate linkage
  modified_base 21: mod_base = OTHER; note = 2'-O-methyl modified nucleoside
gaagaaaagcagaacggtatt

SEQ ID NO: 3064 - RNA, 21 nt, synthetic construct
  source 1..21: mol_type = other RNA
  misc_feature 1: note = ETL17 moiety with phosphorothioate linkage
  modified_base 1: mod_base = OTHER; note = 2'-O-methyl modified nucleoside
  modified_base 2: mod_base = OTHER; note = 2'-O-methyl modified nucleoside
  modified_base 3: mod_base = OTHER; note = 2'-O-methyl modified nucleoside
  modified_base 4: mod_base = OTHER; note = 2'-O-methyl modified nucleoside
  modified_base 5: mod_base = OTHER; note = 2'-fluoro modified nucleoside
  modified_base 6: mod_base = OTHER; note = 2'-fluoro modified nucleoside
  modified_base 7: mod_base = OTHER; note = 2'-fluoro modified nucleoside
  modified_base 8: mod_base = OTHER; note = 2'-fluoro modified nucleoside
  modified_base 9: mod_base = OTHER; note = 2'-fluoro modified nucleoside
  modified_base 10: mod_base = OTHER; note = 2'-O-methyl modified nucleoside
  modified_base 11: mod_base = OTHER; note = 2'-O-methyl modified nucleoside
  modified_base 12: mod_base = OTHER; note = 2'-O-methyl modified nucleoside
  modified_base 13: mod_base = OTHER; note = 2'-O-methyl modified nucleoside
  modified_base 14: mod_base = OTHER; note = 2'-O-methyl modified nucleoside
  modified_base 15: mod_base = OTHER; note = 2'-O-methyl modified nucleoside
  modified_base 16: mod_base = OTHER; note = 2'-O-methyl modified nucleoside
  modified_base 17: mod_base = OTHER; note = 2'-O-methyl modified nucleoside
  modified_base 18: mod_base = OTHER; note = 2'-O-methyl modified nucleoside
  modified_base 19: mod_base = OTHER; note = 2'-O-methyl modified nucleoside with phosphorothioate linkage
  modified_base 20: mod_base = OTHER; note = 2'-O-methyl modified nucleoside with phosphorothioate linkage
  modified_base 21: mod_base = OTHER; note = 2'-O-methyl modified nucleoside
gaagaaaagcagaacggtatt

SEQ ID NO: 3065 - RNA, 21 nt, synthetic construct
  source 1..21: mol_type = other RNA
  misc_feature 1: note = ETL17 moiety with phosphorothioate linkage
  modified_base 1: mod_base = OTHER; note = 2'-O-methyl modified nucleoside
  modified_base 2: mod_base = OTHER; note = 2'-O-methyl modified nucleoside
  modified_base 3: mod_base = OTHER; note = 2'-O-methyl modified nucleoside
  modified_base 4: mod_base = OTHER; note = 2'-O-methyl modified nucleoside
  modified_base 5: mod_base = OTHER; note = 2'-fluoro modified nucleoside
  modified_base 6: mod_base = OTHER; note = 2'-fluoro modified nucleoside
  modified_base 7: mod_base = OTHER; note = 2'-fluoro modified nucleoside
  modified_base 8: mod_base = OTHER; note = 2'-fluoro modified nucleoside
  modified_base 9: mod_base = OTHER; note = 2'-fluoro modified nucleoside
  modified_base 10: mod_base = OTHER; note = 2'-O-methyl modified nucleoside
  modified_base 11: mod_base = OTHER; note = 2'-O-methyl modified nucleoside
  modified_base 12: mod_base = OTHER; note = 2'-O-methyl modified nucleoside
  modified_base 13: mod_base = OTHER; note = 2'-O-methyl modified nucleoside
  modified_base 14: mod_base = OTHER; note = 2'-O-methyl modified nucleoside
  modified_base 15: mod_base = OTHER; note = 2'-O-methyl modified nucleoside
  modified_base 16: mod_base = OTHER; note = 2'-O-methyl modified nucleoside
  modified_base 17: mod_base = OTHER; note = 2'-O-methyl modified nucleoside
  modified_base 18: mod_base = OTHER; note = 2'-O-methyl modified nucleoside
  modified_base 19: mod_base = OTHER; note = 2'-O-methyl modified nucleoside with phosphorothioate linkage
  modified_base 20: mod_base = OTHER; note = 2'-O-methyl modified nucleoside with phosphorothioate linkage
  modified_base 21: mod_base = OTHER; note = 2'-O-methyl modified nucleoside
gaagaaaagcagaacggtatt

SEQ ID NO: 3066 - RNA, 21 nt, synthetic construct
  source 1..21: mol_type = other RNA
  misc_feature 1: note = ETL17 moiety with phosphorothioate linkage
  modified_base 1: mod_base = OTHER; note = 2'-O-methyl modified nucleoside
  modified_base 2: mod_base = OTHER; note = 2'-O-methyl modified nucleoside
  modified_base 3: mod_base = OTHER; note = 2'-O-methyl modified nucleoside
  modified_base 4: mod_base = OTHER; note = 2'-O-methyl modified nucleoside
  modified_base 5: mod_base = OTHER; note = 2'-fluoro modified nucleoside
  modified_base 6: mod_base = OTHER; note = 2'-fluoro modified nucleoside
  modified_base 7: mod_base = OTHER; note = 2'-fluoro modified nucleoside
  modified_base 8: mod_base = OTHER; note = 2'-fluoro modified nucleoside
  modified_base 9: mod_base = OTHER; note = 2'-fluoro modified nucleoside
  modified_base 10: mod_base = OTHER; note = 2'-O-methyl modified nucleoside
  modified_base 11: mod_base = OTHER; note = 2'-O-methyl modified nucleoside
  modified_base 12: mod_base = OTHER; note = 2'-O-methyl modified nucleoside
  modified_base 13: mod_base = OTHER; note = 2'-O-methyl modified nucleoside
  modified_base 14: mod_base = OTHER; note = 2'-O-methyl modified nucleoside
  modified_base 15: mod_base = OTHER; note = 2'-O-methyl modified nucleoside
  modified_base 16: mod_base = OTHER; note = 2'-O-methyl modified nucleoside
  modified_base 17: mod_base = OTHER; note = 2'-O-methyl modified nucleoside
  modified_base 18: mod_base = OTHER; note = 2'-O-methyl modified nucleoside
  modified_base 19: mod_base = OTHER; note = 2'-O-methyl modified nucleoside with phosphorothioate linkage
  modified_base 20: mod_base = OTHER; note = 2'-O-methyl modified nucleoside with phosphorothioate linkage
  modified_base 21: mod_base = OTHER; note = 2'-O-methyl modified nucleoside
gaagaaaagcagaacggtatt

SEQ ID NO: 3067 - RNA, 21 nt, synthetic construct
  source 1..21: mol_type = other RNA
  misc_feature 1: note = ETL17 moiety with phosphorothioate linkage
  modified_base 1: mod_base = OTHER; note = 2'-O-methyl modified nucleoside
  modified_base 2: mod_base = OTHER; note = 2'-O-methyl modified nucleoside
  modified_base 3: mod_base = OTHER; note = 2'-O-methyl modified nucleoside
  modified_base 4: mod_base = OTHER; note = 2'-O-methyl modified nucleoside
  modified_base 5: mod_base = OTHER; note = 2'-fluoro modified nucleoside
  modified_base 6: mod_base = OTHER; note = 2'-fluoro modified nucleoside
  modified_base 7: mod_base = OTHER; note = 2'-fluoro modified nucleoside
  modified_base 8: mod_base = OTHER; note = 2'-fluoro modified nucleoside
  modified_base 9: mod_base = OTHER; note = 2'-fluoro modified nucleoside
  modified_base 10: mod_base = OTHER; note = 2'-O-methyl modified nucleoside
  modified_base 11: mod_base = OTHER; note = 2'-O-methyl modified nucleoside
  modified_base 12: mod_base = OTHER; note = 2'-O-methyl modified nucleoside
  modified_base 13: mod_base = OTHER; note = 2'-O-methyl modified nucleoside
  modified_base 14: mod_base = OTHER; note = 2'-O-methyl modified nucleoside
  modified_base 15: mod_base = OTHER; note = 2'-O-methyl modified nucleoside
  modified_base 16: mod_base = OTHER; note = 2'-O-methyl modified nucleoside
  modified_base 17: mod_base = OTHER; note = 2'-O-methyl modified nucleoside
  modified_base 18: mod_base = OTHER; note = 2'-O-methyl modified nucleoside
  modified_base 19: mod_base = OTHER; note = 2'-O-methyl modified nucleoside with phosphorothioate linkage
  modified_base 20: mod_base = OTHER; note = 2'-O-methyl modified nucleoside with phosphorothioate linkage
  modified_base 21: mod_base = OTHER; note = 2'-O-methyl modified nucleoside
gaagaaaagcagaacggtatt

SEQ ID NO: 3068 - RNA, 21 nt, synthetic construct
  source 1..21: mol_type = other RNA
  misc_feature 1: note = ETL17 moiety with phosphorothioate linkage
  modified_base 1: mod_base = OTHER; note = 2'-O-methyl modified nucleoside
  modified_base 2: mod_base = OTHER; note = 2'-O-methyl modified nucleoside
  modified_base 3: mod_base = OTHER; note = 2'-O-methyl modified nucleoside
  modified_base 4: mod_base = OTHER; note = 2'-O-methyl modified nucleoside
  modified_base 5: mod_base = OTHER; note = 2'-fluoro modified nucleoside
  modified_base 6: mod_base = OTHER; note = 2'-fluoro modified nucleoside
  modified_base 7: mod_base = OTHER; note = 2'-fluoro modified nucleoside
  modified_base 8: mod_base = OTHER; note = 2'-fluoro modified nucleoside
  modified_base 9: mod_base = OTHER; note = 2'-fluoro modified nucleoside
  modified_base 10: mod_base = OTHER; note = 2'-O-methyl modified nucleoside
  modified_base 11: mod_base = OTHER; note = 2'-O-methyl modified nucleoside
  modified_base 12: mod_base = OTHER; note = 2'-O-methyl modified nucleoside
  modified_base 13: mod_base = OTHER; note = 2'-O-methyl modified nucleoside
  modified_base 14: mod_base = OTHER; note = 2'-O-methyl modified nucleoside
  modified_base 15: mod_base = OTHER; note = 2'-O-methyl modified nucleoside
  modified_base 16: mod_base = OTHER; note = 2'-O-methyl modified nucleoside
  modified_base 17: mod_base = OTHER; note = 2'-O-methyl modified nucleoside
  modified_base 18: mod_base = OTHER; note = 2'-O-methyl modified nucleoside
  modified_base 19: mod_base = OTHER; note = 2'-O-methyl modified nucleoside with phosphorothioate linkage
  modified_base 20: mod_base = OTHER; note = 2'-O-methyl modified nucleoside with phosphorothioate linkage
  modified_base 21: mod_base = OTHER; note = 2'-O-methyl modified nucleoside
gaagaaaagcagaacggtatt

SEQ ID NO: 3069 - DNA, 21 bp, synthetic construct
  source 1..21: mol_type = other DNA
  misc_feature 1: note = ETL17 moiety with phosphorothioate linkage
  modified_base 1: mod_base = OTHER; note = 2'-O-methyl modified nucleoside
  modified_base 2: mod_base = OTHER; note = 2'-O-methyl modified nucleoside
  modified_base 3: mod_base = OTHER; note = 2'-O-methyl modified nucleoside
  modified_base 4: mod_base = OTHER; note = 2'-O-methyl modified nucleoside
  modified_base 5: mod_base = OTHER; note = 2'-fluoro modified nucleoside
  modified_base 6: mod_base = OTHER; note = 2'-O-methyl modified nucleoside
  modified_base 7: mod_base = OTHER; note = 2'-fluoro modified nucleoside
  modified_base 8: mod_base = OTHER; note = 2'-fluoro modified nucleoside
  modified_base 10: mod_base = OTHER; note = 2'-fluoro modified nucleoside
  modified_base 11: mod_base = OTHER; note = 2'-O-methyl modified nucleoside
  modified_base 12: mod_base = OTHER; note = 2'-O-methyl modified nucleoside
  modified_base 13: mod_base = OTHER; note = 2'-O-methyl modified nucleoside
  modified_base 14: mod_base = OTHER; note = 2'-O-methyl modified nucleoside
  modified_base 15: mod_base = OTHER; note = 2'-O-methyl modified nucleoside
  modified_base 16: mod_base = OTHER; note = 2'-O-methyl modified nucleoside
  modified_base 17: mod_base = OTHER; note = 2'-O-methyl modified nucleoside
  modified_base 18: mod_base = OTHER; note = 2'-O-methyl modified nucleoside
  modified_base 19: mod_base = OTHER; note = 2'-O-methyl modified nucleoside with phosphorothioate linkage
  modified_base 20: mod_base = OTHER; note = 2'-O-methyl modified nucleoside with phosphorothioate linkage
  modified_base 21: mod_base = OTHER; note = 2'-O-methyl modified nucleoside
  misc_feature 1..8: note = RNA
  misc_feature 9: note = DNA
  misc_feature 10..21: note = RNA
tcctggaatcgatacttgatt

SEQ ID NO: 3070 - RNA, 21 nt, synthetic construct
  source 1..21: mol_type = other RNA
  misc_feature 1: note = ETL17 moiety with phosphorothioate linkage
  modified_base 1: mod_base = OTHER; note = 2'-O-methyl modified nucleoside
  modified_base 2: mod_base = OTHER; note = 2'-O-methyl modified nucleoside
  modified_base 3: mod_base = OTHER; note = 2'-O-methyl modified nucleoside
  modified_base 4: mod_base = OTHER; note = 2'-O-methyl modified nucleoside
  modified_base 5: mod_base = OTHER; note = 2'-fluoro modified nucleoside
  modified_base 6: mod_base = OTHER; note = 2'-O-methyl modified nucleoside
  modified_base 7: mod_base = OTHER; note = 2'-fluoro modified nucleoside
  modified_base 8: mod_base = OTHER; note = 2'-fluoro modified nucleoside
  modified_base 9: mod_base = OTHER; note = 2'-fluoro modified nucleoside
  modified_base 10: mod_base = OTHER; note = 2'-O-methyl modified nucleoside
  modified_base 11: mod_base = OTHER; note = 2'-O-methyl modified nucleoside
  modified_base 12: mod_base = OTHER; note = 2'-O-methyl modified nucleoside
  modified_base 13: mod_base = OTHER; note = 2'-O-methyl modified nucleoside
  modified_base 14: mod_base = OTHER; note = 2'-O-methyl modified nucleoside
  modified_base 15: mod_base = OTHER; note = 2'-O-methyl modified nucleoside
  modified_base 16: mod_base = OTHER; note = 2'-O-methyl modified nucleoside
  modified_base 17: mod_base = OTHER; note = 2'-O-methyl modified nucleoside
  modified_base 18: mod_base = OTHER; note = 2'-O-methyl modified nucleoside
  modified_base 19: mod_base = OTHER; note = 2'-O-methyl modified nucleoside with phosphorothioate linkage
  modified_base 20: mod_base = OTHER; note = 2'-O-methyl modified nucleoside with phosphorothioate linkage
  modified_base 21: mod_base = OTHER; note = 2'-O-methyl modified nucleoside
tcctggaatcgatacttgatt

SEQ ID NO: 3071 - DNA, 21 bp, synthetic construct
  source 1..21: mol_type = other DNA
  misc_feature 1: note = ETL17 moiety with phosphorothioate linkage
  modified_base 1: mod_base = OTHER; note = 2'-O-methyl modified nucleoside
  modified_base 2: mod_base = OTHER; note = 2'-O-methyl modified nucleoside
  modified_base 3: mod_base = OTHER; note = 2'-O-methyl modified nucleoside
  modified_base 4: mod_base = OTHER; note = 2'-O-methyl modified nucleoside
  modified_base 5: mod_base = OTHER; note = 2'-fluoro modified nucleoside
  modified_base 6: mod_base = OTHER; note = 2'-O-methyl modified nucleoside
  modified_base 7: mod_base = OTHER; note = 2'-fluoro modified nucleoside
  modified_base 8: mod_base = OTHER; note = 2'-fluoro modified nucleoside
  modified_base 10: mod_base = OTHER; note = 2'-O-methyl modified nucleoside
  modified_base 11: mod_base = OTHER; note = 2'-O-methyl modified nucleoside
  modified_base 12: mod_base = OTHER; note = 2'-O-methyl modified nucleoside
  modified_base 13: mod_base = OTHER; note = 2'-O-methyl modified nucleoside
  modified_base 14: mod_base = OTHER; note = 2'-O-methyl modified nucleoside
  modified_base 15: mod_base = OTHER; note = 2'-O-methyl modified nucleoside
  modified_base 16: mod_base = OTHER; note = 2'-O-methyl modified nucleoside
  modified_base 17: mod_base = OTHER; note = 2'-O-methyl modified nucleoside
  modified_base 18: mod_base = OTHER; note = 2'-O-methyl modified nucleoside
  modified_base 19: mod_base = OTHER; note = 2'-O-methyl modified nucleoside with phosphorothioate linkage
  modified_base 20: mod_base = OTHER; note = 2'-O-methyl modified nucleoside with phosphorothioate linkage
  modified_base 21: mod_base = OTHER; note = 2'-O-methyl modified nucleoside
  misc_feature 1..8: note = RNA
  misc_feature 9: note = DNA
  misc_feature 10..21: note = RNA
cctggaatcgatacttgtatt

SEQ ID NO: 3072 - RNA, 21 nt, synthetic construct
  source 1..21: mol_type = other RNA
  misc_feature 1: note = ETL17 moiety with phosphorothioate linkage
  modified_base 1: mod_base = OTHER; note = 2'-O-methyl modified nucleoside
  modified_base 2: mod_base = OTHER; note = 2'-O-methyl modified nucleoside
  modified_base 3: mod_base = OTHER; note = 2'-O-methyl modified nucleoside
  modified_base 4: mod_base = OTHER; note = 2'-O-methyl modified nucleoside
  modified_base 5: mod_base = OTHER; note = 2'-fluoro modified nucleoside
  modified_base 6: mod_base = OTHER; note = 2'-O-methyl modified nucleoside
  modified_base 7: mod_base = OTHER; note = 2'-fluoro modified nucleoside
  modified_base 8: mod_base = OTHER; note = 2'-fluoro modified nucleoside
  modified_base 9: mod_base = OTHER; note = 2'-fluoro modified nucleoside
  modified_base 10: mod_base = OTHER; note = 2'-O-methyl modified nucleoside
  modified_base 11: mod_base = OTHER; note = 2'-O-methyl modified nucleoside
  modified_base 12: mod_base = OTHER; note = 2'-O-methyl modified nucleoside
  modified_base 13: mod_base = OTHER; note = 2'-O-methyl modified nucleoside
  modified_base 14: mod_base = OTHER; note = 2'-O-methyl modified nucleoside
  modified_base 15: mod_base = OTHER; note = 2'-O-methyl modified nucleoside
  modified_base 16: mod_base = OTHER; note = 2'-O-methyl modified nucleoside
  modified_base 17: mod_base = OTHER; note = 2'-O-methyl modified nucleoside
  modified_base 18: mod_base = OTHER; note = 2'-O-methyl modified nucleoside
  modified_base 19: mod_base = OTHER; note = 2'-O-methyl modified nucleoside with phosphorothioate linkage
  modified_base 20: mod_base = OTHER; note = 2'-O-methyl modified nucleoside with phosphorothioate linkage
  modified_base 21: mod_base = OTHER; note = 2'-O-methyl modified nucleoside
cctggaatcgatacttgtatt

SEQ ID NO: 3073 - DNA, 21 bp, synthetic construct
  source 1..21: mol_type = other DNA
  misc_feature 1: note = ETL17 moiety with phosphorothioate linkage
  modified_base 1: mod_base = OTHER; note = 2'-O-methyl modified nucleoside
  modified_base 2: mod_base = OTHER; note = 2'-O-methyl modified nucleoside
  modified_base 3: mod_base = OTHER; note = 2'-O-methyl modified nucleoside
  modified_base 4: mod_base = OTHER; note = 2'-O-methyl modified nucleoside
  modified_base 5: mod_base = OTHER; note = 2'-fluoro modified nucleoside
  modified_base 6: mod_base = OTHER; note = 2'-O-methyl modified nucleoside
  modified_base 7: mod_base = OTHER; note = 2'-fluoro modified nucleoside
  modified_base 8: mod_base = OTHER; note = 2'-fluoro modified nucleoside
  modified_base 10: mod_base = OTHER; note = 2'-O-methyl modified nucleoside
  modified_base 11: mod_base = OTHER; note = 2'-O-methyl modified nucleoside
  modified_base 12: mod_base = OTHER; note = 2'-O-methyl modified nucleoside
  modified_base 13: mod_base = OTHER; note = 2'-O-methyl modified nucleoside
  modified_base 14: mod_base = OTHER; note = 2'-O-methyl modified nucleoside
  modified_base 15: mod_base = OTHER; note = 2'-O-methyl modified nucleoside
  modified_base 16: mod_base = OTHER; note = 2'-O-methyl modified nucleoside
  modified_base 17: mod_base = OTHER; note = 2'-O-methyl modified nucleoside
  modified_base 18: mod_base = OTHER; note = 2'-O-methyl modified nucleoside
  modified_base 19: mod_base = OTHER; note = 2'-O-methyl modified nucleoside with phosphorothioate linkage
  modified_base 20: mod_base = OTHER; note = 2'-O-methyl modified nucleoside with phosphorothioate linkage
  modified_base 21: mod_base = OTHER; note = 2'-O-methyl modified nucleoside
  misc_feature 1..8: note = RNA
  misc_feature 9: note = DNA
  misc_feature 10..21: note = RNA
aagaaaagcagaacggtgatt

SEQ ID NO: 3074 - RNA, 21 nt, synthetic construct
  source 1..21: mol_type = other RNA
  misc_feature 1: note = ETL17 moiety with phosphorothioate linkage
  modified_base 1: mod_base = OTHER; note = 2'-O-methyl modified nucleoside
  modified_base 2: mod_base = OTHER; note = 2'-O-methyl modified nucleoside
  modified_base 3: mod_base = OTHER; note = 2'-O-methyl modified nucleoside
  modified_base 4: mod_base = OTHER; note = 2'-O-methyl modified nucleoside
  modified_base 5: mod_base = OTHER; note = 2'-fluoro modified nucleoside
  modified_base 6: mod_base = OTHER; note = 2'-O-methyl modified nucleoside
  modified_base 7: mod_base = OTHER; note = 2'-fluoro modified nucleoside
  modified_base 8: mod_base = OTHER; note = 2'-fluoro modified nucleoside
  modified_base 9: mod_base = OTHER; note = 2'-fluoro modified nucleoside
  modified_base 10: mod_base = OTHER; note = 2'-O-methyl modified nucleoside
  modified_base 11: mod_base = OTHER; note = 2'-O-methyl modified nucleoside
  modified_base 12: mod_base = OTHER; note = 2'-O-methyl modified nucleoside
  modified_base 13: mod_base = OTHER; note = 2'-O-methyl modified nucleoside
  modified_base 14: mod_base = OTHER; note = 2'-O-methyl modified nucleoside
  modified_base 15: mod_base = OTHER; note = 2'-O-methyl modified nucleoside
  modified_base 16: mod_base = OTHER; note = 2'-O-methyl modified nucleoside
  modified_base 17: mod_base = OTHER; note = 2'-O-methyl modified nucleoside
  modified_base 18: mod_base = OTHER; note = 2'-O-methyl modified nucleoside
  modified_base 19: mod_base = OTHER; note = 2'-O-methyl modified nucleoside with phosphorothioate linkage
  modified_base 20: mod_base = OTHER; note = 2'-O-methyl modified nucleoside with phosphorothioate linkage
  modified_base 21: mod_base = OTHER; note = 2'-O-methyl modified nucleoside
aagaaaagcagaacggtgatt

SEQ ID NO: 3075 - DNA, 21 bp, synthetic construct
  source 1..21: mol_type = other DNA
  misc_feature 1: note = ETL17 moiety with phosphorothioate linkage
  modified_base 1: mod_base = OTHER; note = 2'-O-methyl modified nucleoside
  modified_base 2: mod_base = OTHER; note = 2'-O-methyl modified nucleoside
  modified_base 3: mod_base = OTHER; note = 2'-O-methyl modified nucleoside
  modified_base 4: mod_base = OTHER; note = 2'-O-methyl modified nucleoside
  modified_base 5: mod_base = OTHER; note = 2'-fluoro modified nucleoside
  modified_base 6: mod_base = OTHER; note = 2'-O-methyl modified nucleoside
  modified_base 7: mod_base = OTHER; note = 2'-fluoro modified nucleoside
  modified_base 8: mod_base = OTHER; note = 2'-fluoro modified nucleoside
  modified_base 10: mod_base = OTHER; note = 2'-O-methyl modified nucleoside
  modified_base 11: mod_base = OTHER; note = 2'-O-methyl modified nucleoside
  modified_base 12: mod_base = OTHER; note = 2'-O-methyl modified nucleoside
  modified_base 13: mod_base = OTHER; note = 2'-O-methyl modified nucleoside
  modified_base 14: mod_base = OTHER; note = 2'-O-methyl modified nucleoside
  modified_base 15: mod_base = OTHER; note = 2'-O-methyl modified nucleoside
  modified_base 16: mod_base = OTHER; note = 2'-O-methyl modified nucleoside
  modified_base 17: mod_base = OTHER; note = 2'-O-methyl modified nucleoside
  modified_base 18: mod_base = OTHER; note = 2'-O-methyl modified nucleoside
  modified_base 19: mod_base = OTHER; note = 2'-O-methyl modified nucleoside with phosphorothioate linkage
  modified_base 20: mod_base = OTHER; note = 2'-O-methyl modified nucleoside with phosphorothioate linkage
  modified_base 21: mod_base = OTHER; note = 2'-O-methyl modified nucleoside
  misc_feature 1..8: note = RNA
  misc_feature 9: note = DNA
  misc_feature 10..21: note = RNA
cagaacggtgaaagtgggatt

SEQ ID NO: 3076 - RNA, 21 nt, synthetic construct
  source 1..21: mol_type = other RNA
  misc_feature 1: note = ETL17 moiety with phosphorothioate linkage
  modified_base 1: mod_base = OTHER; note = 2'-O-methyl modified nucleoside
  modified_base 2: mod_base = OTHER; note = 2'-O-methyl modified nucleoside
  modified_base 3: mod_base = OTHER; note = 2'-O-methyl modified nucleoside
  modified_base 4: mod_base = OTHER; note = 2'-O-methyl modified nucleoside
  modified_base 5: mod_base = OTHER; note = 2'-fluoro modified nucleoside
  modified_base 6: mod_base = OTHER; note = 2'-O-methyl modified nucleoside
  modified_base 7: mod_base = OTHER; note = 2'-fluoro modified nucleoside
  modified_base 8: mod_base = OTHER; note = 2'-fluoro modified nucleoside
  modified_base 9: mod_base = OTHER; note = 2'-fluoro modified nucleoside
  modified_base 10: mod_base = OTHER; note = 2'-O-methyl modified nucleoside
  modified_base 11: mod_base = OTHER; note = 2'-O-methyl modified nucleoside
  modified_base 12: mod_base = OTHER; note = 2'-O-methyl modified nucleoside
  modified_base 13: mod_base = OTHER; note = 2'-O-methyl modified nucleoside
  modified_base 14: mod_base = OTHER; note = 2'-O-methyl modified nucleoside
  modified_base 15: mod_base = OTHER; note = 2'-O-methyl modified nucleoside
  modified_base 16: mod_base = OTHER; note = 2'-O-methyl modified nucleoside
  modified_base 17: mod_base = OTHER; note = 2'-O-methyl modified nucleoside
  modified_base 18: mod_base = OTHER; note = 2'-O-methyl modified nucleoside
  modified_base 19: mod_base = OTHER; note = 2'-O-methyl modified nucleoside with phosphorothioate linkage
  modified_base 20: mod_base = OTHER; note = 2'-O-methyl modified nucleoside with phosphorothioate linkage
  modified_base 21: mod_base = OTHER; note = 2'-O-methyl modified nucleoside
cagaacggtgaaagtgggatt

SEQ ID NO: 3077 - RNA, 21 nt, synthetic construct
  source 1..21: mol_type = other RNA
  misc_feature 1: note = ETL17 moiety with phosphorothioate linkage
  modified_base 1: mod_base = OTHER; note = 2'-O-methyl modified nucleoside
  modified_base 2: mod_base = OTHER; note = 2'-O-methyl modified nucleoside
  modified_base 3: mod_base = OTHER; note = 2'-O-methyl modified nucleoside
  modified_base 4: mod_base = OTHER; note = 2'-O-methyl modified nucleoside
  modified_base 5: mod_base = OTHER; note = 2'-O-methyl modified nucleoside
  modified_base 6: mod_base = OTHER; note = 2'-fluoro modified nucleoside
  modified_base 7: mod_base = OTHER; note = 2'-fluoro modified nucleoside
  modified_base 8: mod_base = OTHER; note = 2'-fluoro modified nucleoside
  modified_base 9: mod_base = OTHER; note = 2'-fluoro modified nucleoside
  modified_base 10: mod_base = OTHER; note = 2'-fluoro modified nucleoside
  modified_base 11: mod_base = OTHER; note = 2'-O-methyl modified nucleoside
  modified_base 12: mod_base = OTHER; note = 2'-O-methyl modified nucleoside
  modified_base 13: mod_base = OTHER; note = 2'-O-methyl modified nucleoside
  modified_base 14: mod_base = OTHER; note = 2'-O-methyl modified nucleoside
  modified_base 15: mod_base = OTHER; note = 2'-O-methyl modified nucleoside
  modified_base 16: mod_base = OTHER; note = 2'-O-methyl modified nucleoside
  modified_base 17: mod_base = OTHER; note = 2'-O-methyl modified nucleoside
  modified_base 18: mod_base = OTHER; note = 2'-O-methyl modified nucleoside
  modified_base 19: mod_base = OTHER; note = 2'-O-methyl modified nucleoside with phosphorothioate linkage
  modified_base 20: mod_base = OTHER; note = 2'-O-methyl modified nucleoside with phosphorothioate linkage
  modified_base 21: mod_base = OTHER; note = 2'-O-methyl modified nucleoside
tctacaaaggtgaactcaatt

SEQ ID NO: 3078 - RNA, 21 nt, synthetic construct
  source 1..21: mol_type = other RNA
  misc_feature 1: note = ETL17 moiety with phosphorothioate linkage
  modified_base 1: mod_base = OTHER; note = 2'-O-methyl modified nucleoside
  modified_base 2: mod_base = OTHER; note = 2'-O-methyl modified nucleoside
  modified_base 3: mod_base = OTHER; note = 2'-O-methyl modified nucleoside
  modified_base 4: mod_base = OTHER; note = 2'-O-methyl modified nucleoside
  modified_base 5: mod_base = OTHER; note = 2'-fluoro modified nucleoside
  modified_base 6: mod_base = OTHER; note = 2'-fluoro modified nucleoside
  modified_base 7: mod_base = OTHER; note = 2'-fluoro modified nucleoside
  modified_base 8: mod_base = OTHER; note = 2'-fluoro modified nucleoside
  modified_base 9: mod_base = OTHER; note = 2'-fluoro modified nucleoside
  modified_base 10: mod_base = OTHER; note = 2'-O-methyl modified nucleoside
  modified_base 11: mod_base = OTHER; note = 2'-O-methyl modified nucleoside
  modified_base 12: mod_base = OTHER; note = 2'-O-methyl modified nucleoside
  modified_base 13: mod_base = OTHER; note = 2'-O-methyl modified nucleoside
  modified_base 14: mod_base = OTHER; note = 2'-O-methyl modified nucleoside
  modified_base 15: mod_base = OTHER; note = 2'-O-methyl modified nucleoside
  modified_base 16: mod_base = OTHER; note = 2'-O-methyl modified nucleoside
  modified_base 17: mod_base = OTHER; note = 2'-O-methyl modified nucleoside
  modified_base 18: mod_base = OTHER; note = 2'-O-methyl modified nucleoside
  modified_base 19: mod_base = OTHER; note = 2'-O-methyl modified nucleoside with phosphorothioate linkage
  modified_base 20: mod_base = OTHER; note = 2'-O-methyl modified nucleoside with phosphorothioate linkage
  modified_base 21: mod_base = OTHER; note = 2'-O-methyl modified nucleoside
gaagaaaagcagaacggtatt

SEQ ID NO: 3079 - RNA, 21 nt, synthetic construct
  source 1..21: mol_type = other RNA
  misc_feature 1: note = ETL17 moiety with phosphorothioate linkage
  modified_base 1: mod_base = OTHER; note = 2'-O-methyl modified nucleoside
  modified_base 2: mod_base = OTHER; note = 2'-O-methyl modified nucleoside
  modified_base 3: mod_base = OTHER; note = 2'-O-methyl modified nucleoside
  modified_base 4: mod_base = OTHER; note = 2'-O-methyl modified nucleoside
  modified_base 5: mod_base = OTHER; note = 2'-O-methyl modified nucleoside
  modified_base 6: mod_base = OTHER; note = 2'-fluoro modified nucleoside
  modified_base 7: mod_base = OTHER; note = 2'-O-methyl modified nucleoside
  modified_base 8: mod_base = OTHER; note = 2'-fluoro modified nucleoside
  modified_base 9: mod_base = OTHER; note = 2'-fluoro modified nucleoside
  modified_base 10: mod_base = OTHER; note = 2'-O-methyl modified nucleoside
  modified_base 11: mod_base = OTHER; note = 2'-O-methyl modified nucleoside
  modified_base 12: mod_base = OTHER; note = 2'-O-methyl modified nucleoside
  modified_base 13: mod_base = OTHER; note = 2'-O-methyl modified nucleoside
  modified_base 14: mod_base = OTHER; note = 2'-O-methyl modified nucleoside
  modified_base 15: mod_base = OTHER; note = 2'-O-methyl modified nucleoside
  modified_base 16: mod_base = OTHER; note = 2'-O-methyl modified nucleoside
  modified_base 17: mod_base = OTHER; note = 2'-O-methyl modified nucleoside
  modified_base 18: mod_base = OTHER; note = 2'-O-methyl modified nucleoside
  modified_base 19: mod_base = OTHER; note = 2'-O-methyl modified nucleoside with phosphorothioate linkage
  modified_base 20: mod_base = OTHER; note = 2'-O-methyl modified nucleoside with phosphorothioate linkage
  modified_base 21: mod_base = OTHER; note = 2'-O-methyl modified nucleoside
atcgatacttgtatttttatt

SEQ ID NO: 3080 - DNA, 21 bp, synthetic construct
  source 1..21: mol_type = other DNA
  misc_feature 1: note = ETL17 moiety with phosphorothioate linkage
  modified_base 1: mod_base = OTHER; note = 2'-O-methyl modified nucleoside
  modified_base 2: mod_base = OTHER; note = 2'-O-methyl modified nucleoside
  modified_base 3: mod_base = OTHER; note = 2'-O-methyl modified nucleoside
  modified_base 4: mod_base = OTHER; note = 2'-O-methyl modified nucleoside
  modified_base 5: mod_base = OTHER; note = 2'-fluoro modified nucleoside
  modified_base 6: mod_base = OTHER; note = 2'-O-methyl modified nucleoside
  modified_base 7: mod_base = OTHER; note = 2'-fluoro modified nucleoside
  modified_base 8: mod_base = OTHER; note = 2'-fluoro modified nucleoside
  modified_base 10: mod_base = OTHER; note = 2'-O-methyl modified nucleoside
  modified_base 11: mod_base = OTHER; note = 2'-fluoro modified nucleoside
  modified_base 12: mod_base = OTHER; note = 2'-O-methyl modified nucleoside
  modified_base 13: mod_base = OTHER; note = 2'-O-methyl modified nucleoside
  modified_base 14: mod_base = OTHER; note = 2'-O-methyl modified nucleoside
  modified_base 15: mod_base = OTHER; note = 2'-O-methyl modified nucleoside
  modified_base 16: mod_base = OTHER; note = 2'-O-methyl modified nucleoside
  modified_base 17: mod_base = OTHER; note = 2'-O-methyl modified nucleoside
  modified_base 18: mod_base = OTHER; note = 2'-O-methyl modified nucleoside
  modified_base 19: mod_base = OTHER; note = 2'-O-methyl modified nucleoside with phosphorothioate linkage
  modified_base 20: mod_base = OTHER; note = 2'-O-methyl modified nucleoside with phosphorothioate linkage
  modified_base 21: mod_base = OTHER; note = 2'-O-methyl modified nucleoside
  misc_feature 1..8: note = RNA
  misc_feature 9: note = DNA
  misc_feature 10..21: note = RNA
agactcccagggcttttaatt

SEQ ID NO: 3081 - DNA, 21 bp, synthetic construct
  source 1..21: mol_type = other DNA
  misc_feature 1: note = ETL17 moiety with phosphorothioate linkage
  modified_base 1: mod_base = OTHER; note = 2'-O-methyl modified nucleoside
  modified_base 2: mod_base = OTHER; note = 2'-O-methyl modified nucleoside
  modified_base 3: mod_base = OTHER; note = 2'-O-methyl modified nucleoside
  modified_base 4: mod_base = OTHER; note = 2'-O-methyl modified nucleoside
  modified_base 5: mod_base = OTHER; note = 2'-fluoro modified nucleoside
  modified_base 6: mod_base = OTHER; note = 2'-O-methyl modified nucleoside
  modified_base 7: mod_base = OTHER; note = 2'-fluoro modified nucleoside
  modified_base 8: mod_base = OTHER; note = 2'-fluoro modified nucleoside
  modified_base 10: mod_base = OTHER; note = 2'-O-methyl modified nucleoside
  modified_base 11: mod_base = OTHER; note = 2'-fluoro modified nucleoside
  modified_base 12: mod_base = OTHER; note = 2'-O-methyl modified nucleoside
  modified_base 13: mod_base = OTHER; note = 2'-O-methyl modified nucleoside
  modified_base 14: mod_base = OTHER; note = 2'-O-methyl modified nucleoside
  modified_base 15: mod_base = OTHER; note = 2'-O-methyl modified nucleoside
  modified_base 16: mod_base = OTHER; note = 2'-O-methyl modified nucleoside
  modified_base 17: mod_base = OTHER; note = 2'-O-methyl modified nucleoside
  modified_base 18: mod_base = OTHER; note = 2'-O-methyl modified nucleoside
  modified_base 19: mod_base = OTHER; note = 2'-O-methyl modified nucleoside with phosphorothioate linkage
  modified_base 20: mod_base = OTHER; note = 2'-O-methyl modified nucleoside with phosphorothioate linkage
  modified_base 21: mod_base = OTHER; note = 2'-O-methyl modified nucleoside
  misc_feature 1..8: note = RNA
  misc_feature 9: note = DNA
  misc_feature 10..21: note = RNA
tgctttctacaaaggtgaatt

SEQ ID NO: 3082 - DNA, 21 bp, synthetic construct
  source 1..21: mol_type = other DNA
  misc_feature 1: note = ETL17 moiety with phosphorothioate linkage
  modified_base 1: mod_base = OTHER; note = 2'-O-methyl modified nucleoside
  modified_base 2: mod_base = OTHER; note = 2'-O-methyl modified nucleoside
  modified_base 3: mod_base = OTHER; note = 2'-O-methyl modified nucleoside
  modified_base 4: mod_base = OTHER; note = 2'-O-methyl modified nucleoside
  modified_base 5: mod_base = OTHER; note = 2'-fluoro modified nucleoside
  modified_base 6: mod_base = OTHER; note = 2'-O-methyl modified nucleoside
  modified_base 7: mod_base = OTHER; note = 2'-fluoro modified nucleoside
  modified_base 8: mod_base = OTHER; note = 2'-fluoro modified nucleoside
  modified_base 10: mod_base = OTHER; note = 2'-O-methyl modified nucleoside
  modified_base 11: mod_base = OTHER; note = 2'-fluoro modified nucleoside
  modified_base 12: mod_base = OTHER; note = 2'-O-methyl modified nucleoside
  modified_base 13: mod_base = OTHER; note = 2'-O-methyl modified nucleoside
  modified_base 14: mod_base = OTHER; note = 2'-O-methyl modified nucleoside
  modified_base 15: mod_base = OTHER; note = 2'-O-methyl modified nucleoside
  modified_base 16: mod_base = OTHER; note = 2'-O-methyl modified nucleoside
  modified_base 17: mod_base = OTHER; note = 2'-O-methyl modified nucleoside
  modified_base 18: mod_base = OTHER; note = 2'-O-methyl modified nucleoside
  modified_base 19: mod_base = OTHER; note = 2'-O-methyl modified nucleoside with phosphorothioate linkage
  modified_base 20: mod_base = OTHER; note = 2'-O-methyl modified nucleoside with phosphorothioate linkage
  modified_base 21: mod_base = OTHER; note = 2'-O-methyl modified nucleoside
  misc_feature 1..8: note = RNA
  misc_feature 9: note = DNA
  misc_feature 10..21: note = RNA
tacaaaggtgaactcaggatt

SEQ ID NO: 3083 - RNA, 21 nt, synthetic construct
  source 1..21: mol_type = other RNA
  misc_feature 1: note = ETL17 moiety with phosphorothioate linkage
  modified_base 1: mod_base = OTHER; note = 2'-O-methyl modified nucleoside
  modified_base 2: mod_base = OTHER; note = 2'-O-methyl modified nucleoside
  modified_base 3: mod_base = OTHER; note = 2'-O-methyl modified nucleoside
  modified_base 4: mod_base = OTHER; note = 2'-O-methyl modified nucleoside
  modified_base 5: mod_base = OTHER; note = 2'-fluoro modified nucleoside
  modified_base 6: mod_base = OTHER; note = 2'-O-methyl modified nucleoside
  modified_base 7: mod_base = OTHER; note = 2'-fluoro modified nucleoside
  modified_base 8: mod_base = OTHER; note = 2'-O-methyl modified nucleoside
  modified_base 9: mod_base = OTHER; note = 2'-fluoro modified nucleoside
  modified_base 10: mod_base = OTHER; note = 2'-fluoro modified nucleoside
  modified_base 11: mod_base = OTHER; note = 2'-O-methyl modified nucleoside
  modified_base 12: mod_base = OTHER; note = 2'-O-methyl modified nucleoside
  modified_base 13: mod_base = OTHER; note = 2'-O-methyl modified nucleoside
  modified_base 14: mod_base = OTHER; note = 2'-O-methyl modified nucleoside
  modified_base 15: mod_base = OTHER; note = 2'-O-methyl modified nucleoside
  modified_base 16: mod_base = OTHER; note = 2'-O-methyl modified nucleoside
  modified_base 17: mod_base = OTHER; note = 2'-O-methyl modified nucleoside
  modified_base 18: mod_base = OTHER; note = 2'-O-methyl modified nucleoside
  modified_base 19: mod_base = OTHER; note = 2'-O-methyl modified nucleoside with phosphorothioate linkage
  modified_base 20: mod_base = OTHER; note = 2'-O-methyl modified nucleoside with phosphorothioate linkage
  modified_base 21: mod_base = OTHER; note = 2'-O-methyl modified nucleoside
agcagaacggtgaaagtgatt

SEQ ID NO: 3084 - RNA, 21 nt, synthetic construct
  source 1..21: mol_type = other RNA
  misc_feature 1: note = ETL17 moiety with phosphorothioate linkage
  modified_base 1: mod_base = OTHER; note = 2'-O-methyl modified nucleoside
  modified_base 2: mod_base = OTHER; note = 2'-O-methyl modified nucleoside
  modified_base 3: mod_base = OTHER; note = 2'-O-methyl modified nucleoside
  modified_base 4: mod_base = OTHER; note = 2'-O-methyl modified nucleoside
  modified_base 5: mod_base = OTHER; note = 2'-fluoro modified nucleoside
  modified_base 6: mod_base = OTHER; note = 2'-fluoro modified nucleoside
  modified_base 7: mod_base = OTHER; note = 2'-fluoro modified nucleoside
  modified_base 8: mod_base = OTHER; note = 2'-fluoro modified nucleoside
  modified_base 9: mod_base = OTHER; note = 2'-fluoro modified nucleoside
  modified_base 10: mod_base = OTHER; note = 2'-O-methyl modified nucleoside
  modified_base 11: mod_base = OTHER; note = 2'-O-methyl modified nucleoside
  modified_base 12: mod_base = OTHER; note = 2'-O-methyl modified nucleoside
  modified_base 13: mod_base = OTHER; note = 2'-O-methyl modified nucleoside
  modified_base 14: mod_base = OTHER; note = 2'-O-methyl modified nucleoside
  modified_base 15: mod_base = OTHER; note = 2'-O-methyl modified nucleoside
  modified_base 16: mod_base = OTHER; note = 2'-O-methyl modified nucleoside
  modified_base 17: mod_base = OTHER; note = 2'-O-methyl modified nucleoside
  modified_base 18: mod_base = OTHER; note = 2'-O-methyl modified nucleoside
  modified_base 19: mod_base = OTHER; note = 2'-O-methyl modified nucleoside with phosphorothioate linkage
  modified_base 20: mod_base = OTHER; note = 2'-O-methyl modified nucleoside with phosphorothioate linkage
  modified_base 21: mod_base = OTHER; note = 2'-O-methyl modified nucleoside
gaagaaaagcagaacggtatt

SEQ ID NO: 3085 - RNA, 21 nt, synthetic construct
  source 1..21: mol_type = other RNA
  misc_feature 1: note = ETL17 moiety with phosphorothioate linkage
  modified_base 1: mod_base = OTHER; note = 2'-O-methyl modified nucleoside
  modified_base 2: mod_base = OTHER; note = 2'-O-methyl modified nucleoside
  modified_base 3: mod_base = OTHER; note = 2'-O-methyl modified nucleoside
  modified_base 4: mod_base = OTHER; note = 2'-O-methyl modified nucleoside
  modified_base 5: mod_base = OTHER; note = 2'-fluoro modified nucleoside
  modified_base 6: mod_base = OTHER; note = 2'-fluoro modified nucleoside
  modified_base 7: mod_base = OTHER; note = 2'-fluoro modified nucleoside
  modified_base 8: mod_base = OTHER; note = 2'-fluoro modified nucleoside
  modified_base 9: mod_base = OTHER; note = 2'-fluoro modified nucleoside
  modified_base 10: mod_base = OTHER; note = 2'-O-methyl modified nucleoside
  modified_base 11: mod_base = OTHER; note = 2'-O-methyl modified nucleoside
  modified_base 12: mod_base = OTHER; note = 2'-O-methyl modified nucleoside
  modified_base 13: mod_base = OTHER; note = 2'-O-methyl modified nucleoside
  modified_base 14: mod_base = OTHER; note = 2'-O-methyl modified nucleoside
  modified_base 15: mod_base = OTHER; note = 2'-O-methyl modified nucleoside
  modified_base 16: mod_base = OTHER; note = 2'-O-methyl modified nucleoside
  modified_base 17: mod_base = OTHER; note = 2'-O-methyl modified nucleoside
  modified_base 18: mod_base = OTHER; note = 2'-O-methyl modified nucleoside
  modified_base 19: mod_base = OTHER; note = 2'-O-methyl modified nucleoside with phosphorothioate linkage
  modified_base 20: mod_base = OTHER; note = 2'-O-methyl modified nucleoside with phosphorothioate linkage
  modified_base 21: mod_base = OTHER; note = 2'-O-methyl modified nucleoside
gaagaaaagcagaacggtatt

SEQ ID NO: 3086 - RNA, 21 nt, synthetic construct
  source 1..21: mol_type = other RNA
  misc_feature 1: note = ETL17 moiety with phosphorothioate linkage
  modified_base 1: mod_base = OTHER; note = 2'-O-methyl modified nucleoside
  modified_base 2: mod_base = OTHER; note = 2'-O-methyl modified nucleoside
  modified_base 3: mod_base = OTHER; note = 2'-O-methyl modified nucleoside
  modified_base 4: mod_base = OTHER; note = 2'-O-methyl modified nucleoside
  modified_base 5: mod_base = OTHER; note = 2'-fluoro modified nucleoside
  modified_base 6: mod_base = OTHER; note = 2'-fluoro modified nucleoside
  modified_base 7: mod_base = OTHER; note = 2'-fluoro modified nucleoside
  modified_base 8: mod_base = OTHER; note = 2'-fluoro modified nucleoside
  modified_base 9: mod_base = OTHER; note = 2'-fluoro modified nucleoside
  modified_base 10: mod_base = OTHER; note = 2'-O-methyl modified nucleoside
  modified_base 11: mod_base = OTHER; note = 2'-O-methyl modified nucleoside
  modified_base 12: mod_base = OTHER; note = 2'-O-methyl modified nucleoside
  modified_base 13: mod_base = OTHER; note = 2'-O-methyl modified nucleoside
  modified_base 14: mod_base = OTHER; note = 2'-O-methyl modified nucleoside
  modified_base 15: mod_base = OTHER; note = 2'-O-methyl modified nucleoside
  modified_base 16: mod_base = OTHER; note = 2'-O-methyl modified nucleoside
  modified_base 17: mod_base = OTHER; note = 2'-O-methyl modified nucleoside
  modified_base 18: mod_base = OTHER; note = 2'-O-methyl modified nucleoside
  modified_base 19: mod_base = OTHER; note = 2'-O-methyl modified nucleoside with phosphorothioate linkage
  modified_base 20: mod_base = OTHER; note = 2'-O-methyl modified nucleoside with phosphorothioate linkage
  modified_base 21: mod_base = OTHER; note = 2'-O-methyl modified nucleoside
gaagaaaagcagaacggtatt

SEQ ID NO: 3087 - RNA, 21 nt, synthetic construct
  source 1..21: mol_type = other RNA
  misc_feature 1: note = ETL17 moiety with phosphorothioate linkage
  modified_base 1: mod_base = OTHER; note = 2'-O-methyl modified nucleoside
  modified_base 2: mod_base = OTHER; note = 2'-O-methyl modified nucleoside
  modified_base 3: mod_base = OTHER; note = 2'-O-methyl modified nucleoside
  modified_base 4: mod_base = OTHER; note = 2'-O-methyl modified nucleoside
  modified_base 5: mod_base = OTHER; note = 2'-O-methyl modified nucleoside
  modified_base 6: mod_base = OTHER; note = 2'-fluoro modified nucleoside
  modified_base 7: mod_base = OTHER; note = 2'-fluoro modified nucleoside
  modified_base 8: mod_base = OTHER; note = 2'-fluoro modified nucleoside
  modified_base 9: mod_base = OTHER; note = 2'-fluoro modified nucleoside
  modified_base 10: mod_base = OTHER; note = 2'-fluoro modified nucleoside
  modified_base 11: mod_base = OTHER; note = 2'-O-methyl modified nucleoside
  modified_base 12: mod_base = OTHER; note = 2'-O-methyl modified nucleoside
  modified_base 13: mod_base = OTHER; note = 2'-O-methyl modified nucleoside
  modified_base 14: mod_base = OTHER; note = 2'-O-methyl modified nucleoside
  modified_base 15: mod_base = OTHER; note = 2'-O-methyl modified nucleoside
  modified_base 16: mod_base = OTHER; note = 2'-O-methyl modified nucleoside
  modified_base 17: mod_base = OTHER; note = 2'-O-methyl modified nucleoside
  modified_base 18: mod_base = OTHER; note = 2'-O-methyl modified nucleoside
  modified_base 19: mod_base = OTHER; note = 2'-O-methyl modified nucleoside with phosphorothioate linkage
  modified_base 20: mod_base = OTHER; note = 2'-O-methyl modified nucleoside with phosphorothioate linkage
  modified_base 21: mod_base = OTHER; note = 2'-O-methyl modified nucleoside
tctacaaaggtgaactcaatt

SEQ ID NO: 3088 - RNA, 21 nt, synthetic construct
  source 1..21: mol_type = other RNA
  misc_feature 1: note = ETL17 moiety with phosphorothioate linkage
  modified_base 1: mod_base = OTHER; note = 2'-O-methyl modified nucleoside
  modified_base 2: mod_base = OTHER; note = 2'-O-methyl modified nucleoside
  modified_base 3: mod_base = OTHER; note = 2'-O-methyl modified nucleoside
  modified_base 4: mod_base = OTHER; note = 2'-O-methyl modified nucleoside
  modified_base 5: mod_base = OTHER; note = 2'-O-methyl modified nucleoside
  modified_base 6: mod_base = OTHER; note = 2'-fluoro modified nucleoside
  modified_base 7: mod_base = OTHER; note = 2'-fluoro modified nucleoside
  modified_base 8: mod_base = OTHER; note = 2'-fluoro modified nucleoside
  modified_base 9: mod_base = OTHER; note = 2'-fluoro modified nucleoside
  modified_base 10: mod_base = OTHER; note = 2'-fluoro modified nucleoside
  modified_base 11: mod_base = OTHER; note = 2'-O-methyl modified nucleoside
  modified_base 12: mod_base = OTHER; note = 2'-O-methyl modified nucleoside
  modified_base 13: mod_base = OTHER; note = 2'-O-methyl modified nucleoside
  modified_base 14: mod_base = OTHER; note = 2'-O-methyl modified nucleoside
  modified_base 15: mod_base = OTHER; note = 2'-O-methyl modified nucleoside
  modified_base 16: mod_base = OTHER; note = 2'-O-methyl modified nucleoside
  modified_base 17: mod_base = OTHER; note = 2'-O-methyl modified nucleoside
  modified_base 18: mod_base = OTHER; note = 2'-O-methyl modified nucleoside
  modified_base 19: mod_base = OTHER; note = 2'-O-methyl modified nucleoside with phosphorothioate linkage
  modified_base 20: mod_base = OTHER; note = 2'-O-methyl modified nucleoside with phosphorothioate linkage
  modified_base 21: mod_base = OTHER; note = 2'-O-methyl modified nucleoside
tctacaaaggtgaactcaatt

SEQ ID NO: 3089 - RNA, 21 nt, synthetic construct
  source 1..21: mol_type = other RNA
  misc_feature 1: note = ETL17 moiety with phosphorothioate linkage
  modified_base 1: mod_base = OTHER; note = 2'-O-methyl modified nucleoside
  modified_base 2: mod_base = OTHER; note = 2'-O-methyl modified nucleoside
  modified_base 3: mod_base = OTHER; note = 2'-O-methyl modified nucleoside
  modified_base 4: mod_base = OTHER; note = 2'-O-methyl modified nucleoside
  modified_base 5: mod_base = OTHER; note = 2'-O-methyl modified nucleoside
  modified_base 6: mod_base = OTHER; note = 2'-fluoro modified nucleoside
  modified_base 7: mod_base = OTHER; note = 2'-fluoro modified nucleoside
  modified_base 8: mod_base = OTHER; note = 2'-fluoro modified nucleoside
  modified_base 9: mod_base = OTHER; note = 2'-fluoro modified nucleoside
  modified_base 10: mod_base = OTHER; note = 2'-fluoro modified nucleoside
  modified_base 11: mod_base = OTHER; note = 2'-O-methyl modified nucleoside
  modified_base 12: mod_base = OTHER; note = 2'-O-methyl modified nucleoside
  modified_base 13: mod_base = OTHER; note = 2'-O-methyl modified nucleoside
  modified_base 14: mod_base = OTHER; note = 2'-O-methyl modified nucleoside
  modified_base 15: mod_base = OTHER; note = 2'-O-methyl modified nucleoside
  modified_base 16: mod_base = OTHER; note = 2'-O-methyl modified nucleoside
  modified_base 17: mod_base = OTHER; note = 2'-O-methyl modified nucleoside
  modified_base 18: mod_base = OTHER; note = 2'-O-methyl modified nucleoside
  modified_base 19: mod_base = OTHER; note = 2'-O-methyl modified nucleoside with phosphorothioate linkage
  modified_base 20: mod_base = OTHER; note = 2'-O-methyl modified nucleoside with phosphorothioate linkage
  modified_base 21: mod_base = OTHER; note = 2'-O-methyl modified nucleoside
tctacaaaggtgaactcaatt

SEQ ID NO: 3090 - RNA, 21 nt, synthetic construct
  source 1..21: mol_type = other RNA
  misc_feature 1: note = ETL17 moiety with phosphorothioate linkage
  modified_base 1: mod_base = OTHER; note = 2'-O-methyl modified nucleoside
  modified_base 2: mod_base = OTHER; note = 2'-O-methyl modified nucleoside
  modified_base 3: mod_base = OTHER; note = 2'-O-methyl modified nucleoside
  modified_base 4: mod_base = OTHER; note = 2'-O-methyl modified nucleoside
  modified_base 5: mod_base = OTHER; note = 2'-O-methyl modified nucleoside
  modified_base 6: mod_base = OTHER; note = 2'-fluoro modified nucleoside
  modified_base 7: mod_base = OTHER; note = 2'-fluoro modified nucleoside
  modified_base 8: mod_base = OTHER; note = 2'-fluoro modified nucleoside
  modified_base 9: mod_base = OTHER; note = 2'-fluoro modified nucleoside
  modified_base 10: mod_base = OTHER; note = 2'-fluoro modified nucleoside
  modified_base 11: mod_base = OTHER; note = 2'-O-methyl modified nucleoside
  modified_base 12: mod_base = OTHER; note = 2'-O-methyl modified nucleoside
  modified_base 13: mod_base = OTHER; note = 2'-O-methyl modified nucleoside
  modified_base 14: mod_base = OTHER; note = 2'-O-methyl modified nucleoside
  modified_base 15: mod_base = OTHER; note = 2'-O-methyl modified nucleoside
  modified_base 16: mod_base = OTHER; note = 2'-O-methyl modified nucleoside
  modified_base 17: mod_base = OTHER; note = 2'-O-methyl modified nucleoside
  modified_base 18: mod_base = OTHER; note = 2'-O-methyl modified nucleoside
  modified_base 19: mod_base = OTHER; note = 2'-O-methyl modified nucleoside with phosphorothioate linkage
  modified_base 20: mod_base = OTHER; note = 2'-O-methyl modified nucleoside with phosphorothioate linkage
  modified_base 21: mod_base = OTHER; note = 2'-O-methyl modified nucleoside
tctacaaaggtgaactcaatt

SEQ ID NO: 3091 - RNA, 21 nt, synthetic construct
  source 1..21: mol_type = other RNA
  misc_feature 1: note = ETL17 moiety with phosphorothioate linkage
  modified_base 1: mod_base = OTHER; note = 2'-O-methyl modified nucleoside
  modified_base 2: mod_base = OTHER; note = 2'-O-methyl modified nucleoside
  modified_base 3: mod_base = OTHER; note = 2'-O-methyl modified nucleoside
  modified_base 4: mod_base = OTHER; note = 2'-O-methyl modified nucleoside
  modified_base 5: mod_base = OTHER; note = 2'-O-methyl modified nucleoside
  modified_base 6: mod_base = OTHER; note = 2'-fluoro modified nucleoside
  modified_base 7: mod_base = OTHER; note = 2'-fluoro modified nucleoside
  modified_base 8: mod_base = OTHER; note = 2'-O-methyl modified nucleoside
  modified_base 9: mod_base = OTHER; note = 2'-fluoro modified nucleoside
  modified_base 10: mod_base = OTHER; note = 2'-O-methyl modified nucleoside
  modified_base 11: mod_base = OTHER; note = 2'-O-methyl modified nucleoside
  modified_base 12: mod_base = OTHER; note = 2'-O-methyl modified nucleoside
  modified_base 13: mod_base = OTHER; note = 2'-O-methyl modified nucleoside
  modified_base 14: mod_base = OTHER; note = 2'-O-methyl modified nucleoside
  modified_base 15: mod_base = OTHER; note = 2'-O-methyl modified nucleoside
  modified_base 16: mod_base = OTHER; note = 2'-O-methyl modified nucleoside
  modified_base 17: mod_base = OTHER; note = 2'-O-methyl modified nucleoside
  modified_base 18: mod_base = OTHER; note = 2'-O-methyl modified nucleoside
  modified_base 19: mod_base = OTHER; note = 2'-O-methyl modified nucleoside with phosphorothioate linkage
  modified_base 20: mod_base = OTHER; note = 2'-O-methyl modified nucleoside with phosphorothioate linkage
  modified_base 21: mod_base = OTHER; note = 2'-O-methyl modified nucleoside
tggctagtgttaaattgcatt

SEQ ID NO: 3092 - RNA, 21 nt, synthetic construct
  source 1..21: mol_type = other RNA
  misc_feature 1: note = ETL17 moiety with phosphorothioate linkage
  modified_base 1: mod_base = OTHER; note = 2'-O-methyl modified nucleoside
  modified_base 2: mod_base = OTHER; note = 2'-O-methyl modified nucleoside
  modified_base 3: mod_base = OTHER; note = 2'-O-methyl modified nucleoside
  modified_base 4: mod_base = OTHER; note = 2'-O-methyl modified nucleoside
  modified_base 5: mod_base = OTHER; note = 2'-O-methyl modified nucleoside
  modified_base 6: mod_base = OTHER; note = 2'-O-methyl modified nucleoside
  modified_base 7: mod_base = OTHER; note = 2'-fluoro modified nucleoside
  modified_base 8: mod_base = OTHER; note = 2'-O-methyl modified nucleoside
  modified_base 9: mod_base = OTHER; note = 2'-fluoro modified nucleoside
  modified_base 10: mod_base = OTHER; note = 2'-fluoro modified nucleoside
  modified_base 11: mod_base = OTHER; note = 2'-O-methyl modified nucleoside
  modified_base 12: mod_base = OTHER; note = 2'-O-methyl modified nucleoside
  modified_base 13: mod_base = OTHER; note = 2'-O-methyl modified nucleoside
  modified_base 14: mod_base = OTHER; note = 2'-O-methyl modified nucleoside
  modified_base 15: mod_base = OTHER; note = 2'-O-methyl modified nucleoside
  modified_base 16: mod_base = OTHER; note = 2'-O-methyl modified nucleoside
  modified_base 17: mod_base = OTHER; note = 2'-O-methyl modified nucleoside
  modified_base 18: mod_base = OTHER; note = 2'-O-methyl modified nucleoside
  modified_base 19: mod_base = OTHER; note = 2'-O-methyl modified nucleoside with phosphorothioate linkage
  modified_base 20: mod_base = OTHER; note = 2'-O-methyl modified nucleoside with phosphorothioate linkage
  modified_base 21: mod_base = OTHER; note = 2'-O-methyl modified nucleoside
ggctagtgttaaattgctatt

SEQ ID NO: 3093 - RNA, 21 nt, synthetic construct
  source 1..21: mol_type = other RNA
  misc_feature 1: note = ETL17 moiety with phosphorothioate linkage
  modified_base 1: mod_base = OTHER; note = 2'-O-methyl modified nucleoside
  modified_base 2: mod_base = OTHER; note = 2'-O-methyl modified nucleoside
  modified_base 3: mod_base = OTHER; note = 2'-O-methyl modified nucleoside
  modified_base 4: mod_base = OTHER; note = 2'-O-methyl modified nucleoside
  modified_base 5: mod_base = OTHER; note = 2'-O-methyl modified nucleoside
  modified_base 6: mod_base = OTHER; note = 2'-fluoro modified nucleoside
  modified_base 7: mod_base = OTHER; note = 2'-O-methyl modified nucleoside
  modified_base 8: mod_base = OTHER; note = 2'-fluoro modified nucleoside
  modified_base 9: mod_base = OTHER; note = 2'-fluoro modified nucleoside
  modified_base 10: mod_base = OTHER; note = 2'-O-methyl modified nucleoside
  modified_base 11: mod_base = OTHER; note = 2'-O-methyl modified nucleoside
  modified_base 12: mod_base = OTHER; note = 2'-O-methyl modified nucleoside
  modified_base 13: mod_base = OTHER; note = 2'-O-methyl modified nucleoside
  modified_base 14: mod_base = OTHER; note = 2'-O-methyl modified nucleoside
  modified_base 15: mod_base = OTHER; note = 2'-O-methyl modified nucleoside
  modified_base 16: mod_base = OTHER; note = 2'-O-methyl modified nucleoside
  modified_base 17: mod_base = OTHER; note = 2'-O-methyl modified nucleoside
  modified_base 18: mod_base = OTHER; note = 2'-O-methyl modified nucleoside
  modified_base 19: mod_base = OTHER; note = 2'-O-methyl modified nucleoside with phosphorothioate linkage
  modified_base 20: mod_base = OTHER; note = 2'-O-methyl modified nucleoside with phosphorothioate linkage
  modified_base 21: mod_base = OTHER; note = 2'-O-methyl modified nucleoside
gctagtgttaaattgcttatt

SEQ ID NO: 3094 - RNA, 21 nt, synthetic construct
  source 1..21: mol_type = other RNA
  misc_feature 1: note = ETL17 moiety with phosphorothioate linkage
  modified_base 1: mod_base = OTHER; note = 2'-O-methyl modified nucleoside
  modified_base 2: mod_base = OTHER; note = 2'-O-methyl modified nucleoside
  modified_base 3: mod_base = OTHER; note = 2'-O-methyl modified nucleoside
  modified_base 4: mod_base = OTHER; note = 2'-O-methyl modified nucleoside
  modified_base 5: mod_base = OTHER; note = 2'-O-methyl modified nucleoside
  modified_base 6: mod_base = OTHER; note = 2'-fluoro modified nucleoside
  modified_base 7: mod_base = OTHER; note = 2'-fluoro modified nucleoside
  modified_base 8: mod_base = OTHER; note = 2'-fluoro modified nucleoside
  modified_base 9: mod_base = OTHER; note = 2'-fluoro modified nucleoside
  modified_base 10: mod_base = OTHER; note = 2'-O-methyl modified nucleoside
  modified_base 11: mod_base = OTHER; note = 2'-O-methyl modified nucleoside
  modified_base 12: mod_base = OTHER; note = 2'-O-methyl modified nucleoside
  modified_base 13: mod_base = OTHER; note = 2'-O-methyl modified nucleoside
  modified_base 14: mod_base = OTHER; note = 2'-O-methyl modified nucleoside
  modified_base 15: mod_base = OTHER; note = 2'-O-methyl modified nucleoside
  modified_base 16: mod_base = OTHER; note = 2'-O-methyl modified nucleoside
  modified_base 17: mod_base = OTHER; note = 2'-O-methyl modified nucleoside
  modified_base 18: mod_base = OTHER; note = 2'-O-methyl modified nucleoside
  modified_base 19: mod_base = OTHER; note = 2'-O-methyl modified nucleoside with phosphorothioate linkage
  modified_base 20: mod_base = OTHER; note = 2'-O-methyl modified nucleoside with phosphorothioate linkage
  modified_base 21: mod_base = OTHER; note = 2'-O-methyl modified nucleoside
cggtgttttaagaaagccatt

SEQ ID NO: 3095 - RNA, 21 nt, synthetic construct
  source 1..21: mol_type = other RNA
  misc_feature 1: note = ETL17 moiety with phosphorothioate linkage
  modified_base 1: mod_base = OTHER; note = 2'-O-methyl modified nucleoside
  modified_base 2: mod_base = OTHER; note = 2'-O-methyl modified nucleoside
  modified_base 3: mod_base = OTHER; note = 2'-O-methyl modified nucleoside
  modified_base 4: mod_base = OTHER; note = 2'-O-methyl modified nucleoside
  modified_base 5: mod_base = OTHER; note = 2'-fluoro modified nucleoside
  modified_base 6: mod_base = OTHER; note = 2'-fluoro modified nucleoside
  modified_base 7: mod_base = OTHER; note = 2'-fluoro modified nucleoside
  modified_base 8: mod_base = OTHER; note = 2'-fluoro modified nucleoside
  modified_base 9: mod_base = OTHER; note = 2'-fluoro modified nucleoside
  modified_base 10: mod_base = OTHER; note = 2'-O-methyl modified nucleoside
  modified_base 11: mod_base = OTHER; note = 2'-O-methyl modified nucleoside
  modified_base 12: mod_base = OTHER; note = 2'-O-methyl modified nucleoside
  modified_base 13: mod_base = OTHER; note = 2'-O-methyl modified nucleoside
  modified_base 14: mod_base = OTHER; note = 2'-O-methyl modified nucleoside
  modified_base 15: mod_base = OTHER; note = 2'-O-methyl modified nucleoside
  modified_base 16: mod_base = OTHER; note = 2'-O-methyl modified nucleoside
  modified_base 17: mod_base = OTHER; note = 2'-O-methyl modified nucleoside
  modified_base 18: mod_base = OTHER; note = 2'-O-methyl modified nucleoside
  modified_base 19: mod_base = OTHER; note = 2'-O-methyl modified nucleoside with phosphorothioate linkage
  modified_base 20: mod_base = OTHER; note = 2'-O-methyl modified nucleoside with phosphorothioate linkage
  modified_base 21: mod_base = OTHER; note = 2'-O-methyl modified nucleoside
gtacttcctggaatcgatatt

SEQ ID NO: 3096 - RNA, 21 nt, synthetic construct
  source 1..21: mol_type = other RNA
  misc_feature 1: note = ETL17 moiety with phosphorothioate linkage
  modified_base 1: mod_base = OTHER; note = 2'-O-methyl modified nucleoside
  modified_base 2: mod_base = OTHER; note = 2'-O-methyl modified nucleoside
  modified_base 3: mod_base = OTHER; note = 2'-O-methyl modified nucleoside
  modified_base 4: mod_base = OTHER; note = 2'-O-methyl modified nucleoside
  modified_base 5: mod_base = OTHER; note = 2'-O-methyl modified nucleoside
  modified_base 6: mod_base = OTHER; note = 2'-O-methyl modified nucleoside
  modified_base 7: mod_base = OTHER; note = 2'-fluoro modified nucleoside
  modified_base 8: mod_base = OTHER; note = 2'-O-methyl modified nucleoside
  modified_base 9: mod_base = OTHER; note = 2'-fluoro modified nucleoside
  modified_base 10: mod_base = OTHER; note = 2'-O-methyl modified nucleoside
  modified_base 11: mod_base = OTHER; note = 2'-fluoro modified nucleoside
  modified_base 12: mod_base = OTHER; note = 2'-O-methyl modified nucleoside
  modified_base 13: mod_base = OTHER; note = 2'-O-methyl modified nucleoside
  modified_base 14: mod_base = OTHER; note = 2'-O-methyl modified nucleoside
  modified_base 15: mod_base = OTHER; note = 2'-O-methyl modified nucleoside
  modified_base 16: mod_base = OTHER; note = 2'-O-methyl modified nucleoside
  modified_base 17: mod_base = OTHER; note = 2'-O-methyl modified nucleoside
  modified_base 18: mod_base = OTHER; note = 2'-O-methyl modified nucleoside
  modified_base 19: mod_base = OTHER; note = 2'-O-methyl modified nucleoside with phosphorothioate linkage
  modified_base 20: mod_base = OTHER; note = 2'-O-methyl modified nucleoside with phosphorothioate linkage
  modified_base 21: mod_base = OTHER; note = 2'-O-methyl modified nucleoside
caagttacgtgcaccaaaatt

SEQ ID NO: 3097 - RNA, 21 nt, synthetic construct
  source 1..21: mol_type = other RNA
  misc_feature 1: note = ETL17 moiety with phosphorothioate linkage
  modified_base 1: mod_base = OTHER; note = 2'-O-methyl modified nucleoside
  modified_base 2: mod_base = OTHER; note = 2'-O-methyl modified nucleoside
  modified_base 3: mod_base = OTHER; note = 2'-O-methyl modified nucleoside
  modified_base 4: mod_base = OTHER; note = 2'-O-methyl modified nucleoside
  modified_base 5: mod_base = OTHER; note = 2'-fluoro modified nucleoside
  modified_base 6: mod_base = OTHER; note = 2'-O-methyl modified nucleoside
  modified_base 7: mod_base = OTHER; note = 2'-fluoro modified nucleoside
  modified_base 8: mod_base = OTHER; note = 2'-O-methyl modified nucleoside
  modified_base 9: mod_base = OTHER; note = 2'-fluoro modified nucleoside
  modified_base 10: mod_base = OTHER; note = 2'-O-methyl modified nucleoside
  modified_base 11: mod_base = OTHER; note = 2'-fluoro modified nucleoside
  modified_base 12: mod_base = OTHER; note = 2'-O-methyl modified nucleoside
  modified_base 13: mod_base = OTHER; note = 2'-O-methyl modified nucleoside
  modified_base 14: mod_base = OTHER; note = 2'-O-methyl modified nucleoside
  modified_base 15: mod_base = OTHER; note = 2'-O-methyl modified nucleoside
  modified_base 16: mod_base = OTHER; note = 2'-O-methyl modified nucleoside
  modified_base 17: mod_base = OTHER; note = 2'-O-methyl modified nucleoside
  modified_base 18: mod_base = OTHER; note = 2'-O-methyl modified nucleoside
  modified_base 19: mod_base = OTHER; note = 2'-O-methyl modified nucleoside with phosphorothioate linkage
  modified_base 20: mod_base = OTHER; note = 2'-O-methyl modified nucleoside with phosphorothioate linkage
  modified_base 21: mod_base = OTHER; note = 2'-O-methyl modified nucleoside
aagttacgtgcaccaaatatt

SEQ ID NO: 3098 - RNA, 21 nt, synthetic construct
  source 1..21: mol_type = other RNA
  misc_feature 1: note = ETL17 moiety with phosphorothioate linkage
  modified_base 1: mod_base = OTHER; note = 2'-O-methyl modified nucleoside
  modified_base 2: mod_base = OTHER; note = 2'-O-methyl modified nucleoside
  modified_base 3: mod_base = OTHER; note = 2'-O-methyl modified nucleoside
  modified_base 4: mod_base = OTHER; note = 2'-O-methyl modified nucleoside
  modified_base 5: mod_base = OTHER; note = 2'-fluoro modified nucleoside
  modified_base 6: mod_base = OTHER; note = 2'-O-methyl modified nucleoside
  modified_base 7: mod_base = OTHER; note = 2'-fluoro modified nucleoside
  modified_base 8: mod_base = OTHER; note = 2'-O-methyl modified nucleoside
  modified_base 9: mod_base = OTHER; note = 2'-fluoro modified nucleoside
  modified_base 10: mod_base = OTHER; note = 2'-O-methyl modified nucleoside
  modified_base 11: mod_base = OTHER; note = 2'-fluoro modified nucleoside
  modified_base 12: mod_base = OTHER; note = 2'-O-methyl modified nucleoside
  modified_base 13: mod_base = OTHER; note = 2'-O-methyl modified nucleoside
  modified_base 14: mod_base = OTHER; note = 2'-O-methyl modified nucleoside
  modified_base 15: mod_base = OTHER; note = 2'-O-methyl modified nucleoside
  modified_base 16: mod_base = OTHER; note = 2'-O-methyl modified nucleoside
  modified_base 17: mod_base = OTHER; note = 2'-O-methyl modified nucleoside
  modified_base 18: mod_base = OTHER; note = 2'-O-methyl modified nucleoside
  modified_base 19: mod_base = OTHER; note = 2'-O-methyl modified nucleoside with phosphorothioate linkage
  modified_base 20: mod_base = OTHER; note = 2'-O-methyl modified nucleoside with phosphorothioate linkage
  modified_base 21: mod_base = OTHER; note = 2'-O-methyl modified nucleoside
gttacgtgcaccaaattaatt

SEQ ID NO: 3099 - RNA, 21 nt, synthetic construct
  source 1..21: mol_type = other RNA
  misc_feature 1: note = ETL17 moiety with phosphorothioate linkage
  modified_base 1: mod_base = OTHER; note = 2'-O-methyl modified nucleoside
  modified_base 2: mod_base = OTHER; note = 2'-O-methyl modified nucleoside
  modified_base 3: mod_base = OTHER; note = 2'-O-methyl modified nucleoside
  modified_base 4: mod_base = OTHER; note = 2'-O-methyl modified nucleoside
  modified_base 5: mod_base = OTHER; note = 2'-fluoro modified nucleoside
  modified_base 6: mod_base = OTHER; note = 2'-fluoro modified nucleoside
  modified_base 7: mod_base = OTHER; note = 2'-fluoro modified nucleoside
  modified_base 8: mod_base = OTHER; note = 2'-fluoro modified nucleoside
  modified_base 9: mod_base = OTHER; note = 2'-fluoro modified nucleoside
  modified_base 10: mod_base = OTHER; note = 2'-O-methyl modified nucleoside
  modified_base 11: mod_base = OTHER; note = 2'-O-methyl modified nucleoside
  modified_base 12: mod_base = OTHER; note = 2'-O-methyl modified nucleoside
  modified_base 13: mod_base = OTHER; note = 2'-O-methyl modified nucleoside
  modified_base 14: mod_base = OTHER; note = 2'-O-methyl modified nucleoside
  modified_base 15: mod_base = OTHER; note = 2'-O-methyl modified nucleoside
  modified_base 16: mod_base = OTHER; note = 2'-O-methyl modified nucleoside
  modified_base 17: mod_base = OTHER; note = 2'-O-methyl modified nucleoside
  modified_base 18: mod_base = OTHER; note = 2'-O-methyl modified nucleoside
  modified_base 19: mod_base = OTHER; note = 2'-O-methyl modified nucleoside with phosphorothioate linkage
  modified_base 20: mod_base = OTHER; note = 2'-O-methyl modified nucleoside with phosphorothioate linkage
  modified_base 21: mod_base = OTHER; note = 2'-O-methyl modified nucleoside
atattttctcactgagacatt

SEQ ID NO: 3100 - RNA, 21 nt, synthetic construct
  source 1..21: mol_type = other RNA
  misc_feature 1: note = ETL17 moiety with phosphorothioate linkage
  modified_base 1: mod_base = OTHER; note = 2'-O-methyl modified nucleoside
  modified_base 2: mod_base = OTHER; note = 2'-O-methyl modified nucleoside
  modified_base 3: mod_base = OTHER; note = 2'-O-methyl modified nucleoside
  modified_base 4: mod_base = OTHER; note = 2'-O-methyl modified nucleoside
  modified_base 5: mod_base = OTHER; note = 2'-fluoro modified nucleoside
  modified_base 6: mod_base = OTHER; note = 2'-O-methyl modified nucleoside
  modified_base 7: mod_base = OTHER; note = 2'-fluoro modified nucleoside
  modified_base 8: mod_base = OTHER; note = 2'-fluoro modified nucleoside
  modified_base 9: mod_base = OTHER; note = 2'-fluoro modified nucleoside
  modified_base 10: mod_base = OTHER; note = 2'-fluoro modified nucleoside
  modified_base 11: mod_base = OTHER; note = 2'-O-methyl modified nucleoside
  modified_base 12: mod_base = OTHER; note = 2'-O-methyl modified nucleoside
  modified_base 13: mod_base = OTHER; note = 2'-O-methyl modified nucleoside
  modified_base 14: mod_base = OTHER; note = 2'-O-methyl modified nucleoside
  modified_base 15: mod_base = OTHER; note = 2'-O-methyl modified nucleoside
  modified_base 16: mod_base = OTHER; note = 2'-O-methyl modified nucleoside
  modified_base 17: mod_base = OTHER; note = 2'-O-methyl modified nucleoside
  modified_base 18: mod_base = OTHER; note = 2'-O-methyl modified nucleoside
  modified_base 19: mod_base = OTHER; note = 2'-O-methyl modified nucleoside with phosphorothioate linkage
  modified_base 20: mod_base = OTHER; note = 2'-O-methyl modified nucleoside with phosphorothioate linkage
  modified_base 21: mod_base = OTHER; note = 2'-O-methyl modified nucleoside
gtctacaaaatctactaaatt

SEQ ID NO: 3101 - RNA, 21 nt, synthetic construct
  source 1..21: mol_type = other RNA
  misc_feature 1: note = ETL17 moiety with phosphorothioate linkage
  modified_base 1: mod_base = OTHER; note = 2'-O-methyl modified nucleoside
  modified_base 2: mod_base = OTHER; note = 2'-O-methyl modified nucleoside
  modified_base 3: mod_base = OTHER; note = 2'-O-methyl modified nucleoside
  modified_base 4: mod_base = OTHER; note = 2'-O-methyl modified nucleoside
  modified_base 5: mod_base = OTHER; note = 2'-fluoro modified nucleoside
  modified_base 6: mod_base = OTHER; note = 2'-fluoro modified nucleoside
  modified_base 7: mod_base = OTHER; note = 2'-fluoro modified nucleoside
  modified_base 8: mod_base = OTHER; note = 2'-fluoro modified nucleoside
  modified_base 9: mod_base = OTHER; note = 2'-fluoro modified nucleoside
  modified_base 10: mod_base = OTHER; note = 2'-O-methyl modified nucleoside
  modified_base 11: mod_base = OTHER; note = 2'-O-methyl modified nucleoside
  modified_base 12: mod_base = OTHER; note = 2'-O-methyl modified nucleoside
  modified_base 13: mod_base = OTHER; note = 2'-O-methyl modified nucleoside
  modified_base 14: mod_base = OTHER; note = 2'-O-methyl modified nucleoside
  modified_base 15: mod_base = OTHER; note = 2'-O-methyl modified nucleoside
  modified_base 16: mod_base = OTHER; note = 2'-O-methyl modified nucleoside
  modified_base 17: mod_base = OTHER; note = 2'-O-methyl modified nucleoside
  modified_base 18: mod_base = OTHER; note = 2'-O-methyl modified nucleoside
  modified_base 19: mod_base = OTHER; note = 2'-O-methyl modified nucleoside with phosphorothioate linkage
  modified_base 20: mod_base = OTHER; note = 2'-O-methyl modified nucleoside with phosphorothioate linkage
  modified_base 21: mod_base = OTHER; note = 2'-O-methyl modified nucleoside
agtcttttcggtatgatgatt

SEQ ID NO: 3102 - RNA, 21 nt, synthetic construct
  source 1..21: mol_type = other RNA
  misc_feature 1: note = ETL17 moiety with phosphorothioate linkage
  modified_base 1: mod_base = OTHER; note = 2'-O-methyl modified nucleoside
  modified_base 2: mod_base = OTHER; note = 2'-O-methyl modified nucleoside
  modified_base 3: mod_base = OTHER; note = 2'-O-methyl modified nucleoside
  modified_base 4: mod_base = OTHER; note = 2'-O-methyl modified nucleoside
  modified_base 5: mod_base = OTHER; note = 2'-fluoro modified nucleoside
  modified_base 6: mod_base = OTHER; note = 2'-O-methyl modified nucleoside
  modified_base 7: mod_base = OTHER; note = 2'-fluoro modified nucleoside
  modified_base 8: mod_base = OTHER; note = 2'-O-methyl modified nucleoside
  modified_base 9: mod_base = OTHER; note = 2'-fluoro modified nucleoside
  modified_base 10: mod_base = OTHER; note = 2'-O-methyl modified nucleoside
  modified_base 11: mod_base = OTHER; note = 2'-O-methyl modified nucleoside
  modified_base 12: mod_base = OTHER; note = 2'-O-methyl modified nucleoside
  modified_base 13: mod_base = OTHER; note = 2'-O-methyl modified nucleoside
  modified_base 14: mod_base = OTHER; note = 2'-O-methyl modified nucleoside
  modified_base 15: mod_base = OTHER; note = 2'-O-methyl modified nucleoside
  modified_base 16: mod_base = OTHER; note = 2'-O-methyl modified nucleoside
  modified_base 17: mod_base = OTHER; note = 2'-O-methyl modified nucleoside
  modified_base 18: mod_base = OTHER; note = 2'-O-methyl modified nucleoside
  modified_base 19: mod_base = OTHER; note = 2'-O-methyl modified nucleoside with phosphorothioate linkage
  modified_base 20: mod_base = OTHER; note = 2'-O-methyl modified nucleoside with phosphorothioate linkage
  modified_base 21: mod_base = OTHER; note = 2'-O-methyl modified nucleoside
ggctagatattgggagaaatt

SEQ ID NO: 3103 - RNA, 21 nt, synthetic construct
  source 1..21: mol_type = other RNA
  misc_feature 1: note = ETL17 moiety with phosphorothioate linkage
  modified_base 1: mod_base = OTHER; note = 2'-O-methyl modified nucleoside
  modified_base 2: mod_base = OTHER; note = 2'-O-methyl modified nucleoside
  modified_base 3: mod_base = OTHER; note = 2'-O-methyl modified nucleoside
  modified_base 4: mod_base = OTHER; note = 2'-O-methyl modified nucleoside
  modified_base 5: mod_base = OTHER; note = 2'-fluoro modified nucleoside
  modified_base 6: mod_base = OTHER; note = 2'-O-methyl modified nucleoside
  modified_base 7: mod_base = OTHER; note = 2'-O-methyl modified nucleoside
  modified_base 8: mod_base = OTHER; note = 2'-fluoro modified nucleoside
  modified_base 9: mod_base = OTHER; note = 2'-fluoro modified nucleoside
  modified_base 10: mod_base = OTHER; note = 2'-fluoro modified nucleoside
  modified_base 11: mod_base = OTHER; note = 2'-fluoro modified nucleoside
  modified_base 12: mod_base = OTHER; note = 2'-O-methyl modified nucleoside
  modified_base 13: mod_base = OTHER; note = 2'-O-methyl modified nucleoside
  modified_base 14: mod_base = OTHER; note = 2'-O-methyl modified nucleoside
  modified_base 15: mod_base = OTHER; note = 2'-O-methyl modified nucleoside
  modified_base 16: mod_base = OTHER; note = 2'-O-methyl modified nucleoside
  modified_base 17: mod_base = OTHER; note = 2'-O-methyl modified nucleoside
  modified_base 18: mod_base = OTHER; note = 2'-O-methyl modified nucleoside
  modified_base 19: mod_base = OTHER; note = 2'-O-methyl modified nucleoside with phosphorothioate linkage
  modified_base 20: mod_base = OTHER; note = 2'-O-methyl modified nucleoside with phosphorothioate linkage
  modified_base 21: mod_base = OTHER; note = 2'-O-methyl modified nucleoside
agatattgggagaaacaaatt

SEQ ID NO: 3104 - RNA, 21 nt, synthetic construct
  source 1..21: mol_type = other RNA
  misc_feature 1: note = ETL17 moiety with phosphorothioate linkage
  modified_base 1: mod_base = OTHER; note = 2'-O-methyl modified nucleoside
  modified_base 2: mod_base = OTHER; note = 2'-O-methyl modified nucleoside
  modified_base 3: mod_base = OTHER; note = 2'-O-methyl modified nucleoside
  modified_base 4: mod_base = OTHER; note = 2'-O-methyl modified nucleoside
  modified_base 5: mod_base = OTHER; note = 2'-O-methyl modified nucleoside
  modified_base 6: mod_base = OTHER; note = 2'-fluoro modified nucleoside
  modified_base 7: mod_base = OTHER; note = 2'-O-methyl modified nucleoside
  modified_base 8: mod_base = OTHER; note = 2'-O-methyl modified nucleoside
  modified_base 9: mod_base = OTHER; note = 2'-fluoro modified nucleoside
  modified_base 10: mod_base = OTHER; note = 2'-fluoro modified nucleoside
  modified_base 11: mod_base = OTHER; note = 2'-O-methyl modified nucleoside
  modified_base 12: mod_base = OTHER; note = 2'-O-methyl modified nucleoside
  modified_base 13: mod_base = OTHER; note = 2'-O-methyl modified nucleoside
  modified_base 14: mod_base = OTHER; note = 2'-O-methyl modified nucleoside
  modified_base 15: mod_base = OTHER; note = 2'-O-methyl modified nucleoside
  modified_base 16: mod_base = OTHER; note = 2'-O-methyl modified nucleoside
  modified_base 17: mod_base = OTHER; note = 2'-O-methyl modified nucleoside
  modified_base 18: mod_base = OTHER; note = 2'-O-methyl modified nucleoside
  modified_base 19: mod_base = OTHER; note = 2'-O-methyl modified nucleoside with phosphorothioate linkage
  modified_base 20: mod_base = OTHER; note = 2'-O-methyl modified nucleoside with phosphorothioate linkage
  modified_base 21: mod_base = OTHER; note = 2'-O-methyl modified nucleoside
gatacattggatcttctcatt

SEQ ID NO: 3105 - RNA, 21 nt, synthetic construct
  source 1..21: mol_type = other RNA
  misc_feature 1: note = ETL17 moiety with phosphorothioate linkage
  modified_base 1: mod_base = OTHER; note = 2'-O-methyl modified nucleoside
  modified_base 2: mod_base = OTHER; note = 2'-O-methyl modified nucleoside
  modified_base 3: mod_base = OTHER; note = 2'-O-methyl modified nucleoside
  modified_base 4: mod_base = OTHER; note = 2'-O-methyl modified nucleoside
  modified_base 5: mod_base = OTHER; note = 2'-fluoro modified nucleoside
  modified_base 6: mod_base = OTHER; note = 2'-O-methyl modified nucleoside
  modified_base 7: mod_base = OTHER; note = 2'-fluoro modified nucleoside
  modified_base 8: mod_base = OTHER; note = 2'-O-methyl modified nucleoside
  modified_base 9: mod_base = OTHER; note = 2'-fluoro modified nucleoside
  modified_base 10: mod_base = OTHER; note = 2'-fluoro modified nucleoside
  modified_base 11: mod_base = OTHER; note = 2'-O-methyl modified nucleoside
  modified_base 12: mod_base = OTHER; note = 2'-O-methyl modified nucleoside
  modified_base 13: mod_base = OTHER; note = 2'-O-methyl modified nucleoside
  modified_base 14: mod_base = OTHER; note = 2'-O-methyl modified nucleoside
  modified_base 15: mod_base = OTHER; note = 2'-O-methyl modified nucleoside
  modified_base 16: mod_base = OTHER; note = 2'-O-methyl modified nucleoside
  modified_base 17: mod_base = OTHER; note = 2'-O-methyl modified nucleoside
  modified_base 18: mod_base = OTHER; note = 2'-O-methyl modified nucleoside
  modified_base 19: mod_base = OTHER; note = 2'-O-methyl modified nucleoside with phosphorothioate linkage
  modified_base 20: mod_base = OTHER; note = 2'-O-methyl modified nucleoside with phosphorothioate linkage
  modified_base 21: mod_base = OTHER; note = 2'-O-methyl modified nucleoside
tcttctcattggagaggaatt

SEQ ID NO: 3106 - RNA, 21 nt, synthetic construct
  source 1..21: mol_type = other RNA
  misc_feature 1: note = ETL17 moiety with phosphorothioate linkage
  modified_base 1: mod_base = OTHER; note = 2'-O-methyl modified nucleoside
  modified_base 2: mod_base = OTHER; note = 2'-O-methyl modified nucleoside
  modified_base 3: mod_base = OTHER; note = 2'-O-methyl modified nucleoside
  modified_base 4: mod_base = OTHER; note = 2'-O-methyl modified nucleoside
  modified_base 5: mod_base = OTHER; note = 2'-O-methyl modified nucleoside
  modified_base 6: mod_base = OTHER; note = 2'-O-methyl modified nucleoside
  modified_base 7: mod_base = OTHER; note = 2'-fluoro modified nucleoside
  modified_base 8: mod_base = OTHER; note = 2'-fluoro modified nucleoside
  modified_base 9: mod_base = OTHER; note = 2'-fluoro modified nucleoside
  modified_base 10: mod_base = OTHER; note = 2'-fluoro modified nucleoside
  modified_base 11: mod_base = OTHER; note = 2'-fluoro modified nucleoside
  modified_base 12: mod_base = OTHER; note = 2'-O-methyl modified nucleoside
  modified_base 13: mod_base = OTHER; note = 2'-O-methyl modified nucleoside
  modified_base 14: mod_base = OTHER; note = 2'-O-methyl modified nucleoside
  modified_base 15: mod_base = OTHER; note = 2'-O-methyl modified nucleoside
  modified_base 16: mod_base = OTHER; note = 2'-O-methyl modified nucleoside
  modified_base 17: mod_base = OTHER; note = 2'-O-methyl modified nucleoside
  modified_base 18: mod_base = OTHER; note = 2'-O-methyl modified nucleoside
  modified_base 19: mod_base = OTHER; note = 2'-O-methyl modified nucleoside with phosphorothioate linkage
  modified_base 20: mod_base = OTHER; note = 2'-O-methyl modified nucleoside with phosphorothioate linkage
  modified_base 21: mod_base = OTHER; note = 2'-O-methyl modified nucleoside
ctcattggagaggataaaatt

SEQ ID NO: 3107 - RNA, 21 nt, synthetic construct
  source 1..21: mol_type = other RNA
  misc_feature 1: note = ETL17 moiety with phosphorothioate linkage
  modified_base 1: mod_base = OTHER; note = 2'-O-methyl modified nucleoside
  modified_base 2: mod_base = OTHER; note = 2'-O-methyl modified nucleoside
  modified_base 3: mod_base = OTHER; note = 2'-O-methyl modified nucleoside
  modified_base 4: mod_base = OTHER; note = 2'-O-methyl modified nucleoside
  modified_base 5: mod_base = OTHER; note = 2'-fluoro modified nucleoside
  modified_base 6: mod_base = OTHER; note = 2'-O-methyl modified nucleoside
  modified_base 7: mod_base = OTHER; note = 2'-fluoro modified nucleoside
  modified_base 8: mod_base = OTHER; note = 2'-fluoro modified nucleoside
  modified_base 9: mod_base = OTHER; note = 2'-fluoro modified nucleoside
  modified_base 10: mod_base = OTHER; note = 2'-fluoro modified nucleoside
  modified_base 11: mod_base = OTHER; note = 2'-O-methyl modified nucleoside
  modified_base 12: mod_base = OTHER; note = 2'-O-methyl modified nucleoside
  modified_base 13: mod_base = OTHER; note = 2'-O-methyl modified nucleoside
  modified_base 14: mod_base = OTHER; note = 2'-O-methyl modified nucleoside
  modified_base 15: mod_base = OTHER; note = 2'-O-methyl modified nucleoside
  modified_base 16: mod_base = OTHER; note = 2'-O-methyl modified nucleoside
  modified_base 17: mod_base = OTHER; note = 2'-O-methyl modified nucleoside
  modified_base 18: mod_base = OTHER; note = 2'-O-methyl modified nucleoside
  modified_base 19: mod_base = OTHER; note = 2'-O-methyl modified nucleoside with phosphorothioate linkage
  modified_base 20: mod_base = OTHER; note = 2'-O-methyl modified nucleoside with phosphorothioate linkage
  modified_base 21: mod_base = OTHER; note = 2'-O-methyl modified nucleoside
ggataaagaagcaggaacatt

SEQ ID NO: 3108 - RNA, 21 nt, synthetic construct
  source 1..21: mol_type = other RNA
  misc_feature 1: note = ETL17 moiety with phosphorothioate linkage
  modified_base 1: mod_base = OTHER; note = 2'-O-methyl modified nucleoside
  modified_base 2: mod_base = OTHER; note = 2'-O-methyl modified nucleoside
  modified_base 3: mod_base = OTHER; note = 2'-O-methyl modified nucleoside
  modified_base 4: mod_base = OTHER; note = 2'-O-methyl modified nucleoside
  modified_base 5: mod_base = OTHER; note = 2'-O-methyl modified nucleoside
  modified_base 6: mod_base = OTHER; note = 2'-fluoro modified nucleoside
  modified_base 7: mod_base = OTHER; note = 2'-O-methyl modified nucleoside
  modified_base 8: mod_base = OTHER; note = 2'-O-methyl modified nucleoside
  modified_base 9: mod_base = OTHER; note = 2'-fluoro modified nucleoside
  modified_base 10: mod_base = OTHER; note = 2'-fluoro modified nucleoside
  modified_base 11: mod_base = OTHER; note = 2'-O-methyl modified nucleoside
  modified_base 12: mod_base = OTHER; note = 2'-O-methyl modified nucleoside
  modified_base 13: mod_base = OTHER; note = 2'-O-methyl modified nucleoside
  modified_base 14: mod_base = OTHER; note = 2'-O-methyl modified nucleoside
  modified_base 15: mod_base = OTHER; note = 2'-O-methyl modified nucleoside
  modified_base 16: mod_base = OTHER; note = 2'-O-methyl modified nucleoside
  modified_base 17: mod_base = OTHER; note = 2'-O-methyl modified nucleoside
  modified_base 18: mod_base = OTHER; note = 2'-O-methyl modified nucleoside
  modified_base 19: mod_base = OTHER; note = 2'-O-methyl modified nucleoside with phosphorothioate linkage
  modified_base 20: mod_base = OTHER; note = 2'-O-methyl modified nucleoside with phosphorothioate linkage
  modified_base 21: mod_base = OTHER; note = 2'-O-methyl modified nucleoside
agagacagttatgcggatatt

SEQ ID NO: 3109 - RNA, 21 nt, synthetic construct
  source 1..21: mol_type = other RNA
  misc_feature 1: note = ETL17 moiety with phosphorothioate linkage
  modified_base 1: mod_base = OTHER; note = 2'-O-methyl modified nucleoside
  modified_base 2: mod_base = OTHER; note = 2'-O-methyl modified nucleoside
  modified_base 3: mod_base = OTHER; note = 2'-O-methyl modified nucleoside
  modified_base 4: mod_base = OTHER; note = 2'-O-methyl modified nucleoside
  modified_base 5: mod_base = OTHER; note = 2'-fluoro modified nucleoside
  modified_base 6: mod_base = OTHER; note = 2'-fluoro modified nucleoside
  modified_base 7: mod_base = OTHER; note = 2'-O-methyl modified nucleoside
  modified_base 8: mod_base = OTHER; note = 2'-O-methyl modified nucleoside
  modified_base 9: mod_base = OTHER; note = 2'-fluoro modified nucleoside
  modified_base 10: mod_base = OTHER; note = 2'-O-methyl modified nucleoside
  modified_base 11: mod_base = OTHER; note = 2'-fluoro modified nucleoside
  modified_base 12: mod_base = OTHER; note = 2'-O-methyl modified nucleoside
  modified_base 13: mod_base = OTHER; note = 2'-O-methyl modified nucleoside
  modified_base 14: mod_base = OTHER; note = 2'-O-methyl modified nucleoside
  modified_base 15: mod_base = OTHER; note = 2'-O-methyl modified nucleoside
  modified_base 16: mod_base = OTHER; note = 2'-O-methyl modified nucleoside
  modified_base 17: mod_base = OTHER; note = 2'-O-methyl modified nucleoside
  modified_base 18: mod_base = OTHER; note = 2'-O-methyl modified nucleoside
  modified_base 19: mod_base = OTHER; note = 2'-O-methyl modified nucleoside with phosphorothioate linkage
  modified_base 20: mod_base = OTHER; note = 2'-O-methyl modified nucleoside with phosphorothioate linkage
  modified_base 21: mod_base = OTHER; note = 2'-O-methyl modified nucleoside
agacagttatgcggattcatt

SEQ ID NO: 3110 - RNA, 21 nt, synthetic construct
  source 1..21: mol_type = other RNA
  misc_feature 1: note = ETL17 moiety with phosphorothioate linkage
  modified_base 1: mod_base = OTHER; note = 2'-O-methyl modified nucleoside
  modified_base 2: mod_base = OTHER; note = 2'-O-methyl modified nucleoside
  modified_base 3: mod_base = OTHER; note = 2'-O-methyl modified nucleoside
  modified_base 4: mod_base = OTHER; note = 2'-O-methyl modified nucleoside
  modified_base 5: mod_base = OTHER; note = 2'-fluoro modified nucleoside
  modified_base 6: mod_base = OTHER; note = 2'-O-methyl modified nucleoside
  modified_base 7: mod_base = OTHER; note = 2'-fluoro modified nucleoside
  modified_base 8: mod_base = OTHER; note = 2'-O-methyl modified nucleoside
  modified_base 9: mod_base = OTHER; note = 2'-fluoro modified nucleoside
  modified_base 10: mod_base = OTHER; note = 2'-O-methyl modified nucleoside
  modified_base 11: mod_base = OTHER; note = 2'-O-methyl modified nucleoside
  modified_base 12: mod_base = OTHER; note = 2'-O-methyl modified nucleoside
  modified_base 13: mod_base = OTHER; note = 2'-O-methyl modified nucleoside
  modified_base 14: mod_base = OTHER; note = 2'-O-methyl modified nucleoside
  modified_base 15: mod_base = OTHER; note = 2'-O-methyl modified nucleoside
  modified_base 16: mod_base = OTHER; note = 2'-O-methyl modified nucleoside
  modified_base 17: mod_base = OTHER; note = 2'-O-methyl modified nucleoside
  modified_base 18: mod_base = OTHER; note = 2'-O-methyl modified nucleoside
  modified_base 19: mod_base = OTHER; note = 2'-O-methyl modified nucleoside with phosphorothioate linkage
  modified_base 20: mod_base = OTHER; note = 2'-O-methyl modified nucleoside with phosphorothioate linkage
  modified_base 21: mod_base = OTHER; note = 2'-O-methyl modified nucleoside
cagttatgcggattctctatt

SEQ ID NO: 3111 - RNA, 21 nt, synthetic construct
  source 1..21: mol_type = other RNA
  misc_feature 1: note = ETL17 moiety with phosphorothioate linkage
  modified_base 1: mod_base = OTHER; note = 2'-O-methyl modified nucleoside
  modified_base 2: mod_base = OTHER; note = 2'-O-methyl modified nucleoside
  modified_base 3: mod_base = OTHER; note = 2'-O-methyl modified nucleoside
  modified_base 4: mod_base = OTHER; note = 2'-O-methyl modified nucleoside
  modified_base 5: mod_base = OTHER; note = 2'-fluoro modified nucleoside
  modified_base 6: mod_base = OTHER; note = 2'-O-methyl modified nucleoside
  modified_base 7: mod_base = OTHER; note = 2'-fluoro modified nucleoside
  modified_base 8: mod_base = OTHER; note = 2'-O-methyl modified nucleoside
  modified_base 9: mod_base = OTHER; note = 2'-fluoro modified nucleoside
  modified_base 10: mod_base = OTHER; note = 2'-O-methyl modified nucleoside
  modified_base 11: mod_base = OTHER; note = 2'-O-methyl modified nucleoside
  modified_base 12: mod_base = OTHER; note = 2'-O-methyl modified nucleoside
  modified_base 13: mod_base = OTHER; note = 2'-O-methyl modified nucleoside
  modified_base 14: mod_base = OTHER; note = 2'-O-methyl modified nucleoside
  modified_base 15: mod_base = OTHER; note = 2'-O-methyl modified nucleoside
  modified_base 16: mod_base = OTHER; note = 2'-O-methyl modified nucleoside
  modified_base 17: mod_base = OTHER; note = 2'-O-methyl modified nucleoside
  modified_base 18: mod_base = OTHER; note = 2'-O-methyl modified nucleoside
  modified_base 19: mod_base = OTHER; note = 2'-O-methyl modified nucleoside with phosphorothioate linkage
  modified_base 20: mod_base = OTHER; note = 2'-O-methyl modified nucleoside with phosphorothioate linkage
  modified_base 21: mod_base = OTHER; note = 2'-O-methyl modified nucleoside
ttatgcggattctcttgaatt

SEQ ID NO: 3112 - RNA, 21 nt, synthetic construct
  source 1..21: mol_type = other RNA
  misc_feature 1: note = ETL17 moiety with phosphorothioate linkage
  modified_base 1: mod_base = OTHER; note = 2'-O-methyl modified nucleoside
  modified_base 2: mod_base = OTHER; note = 2'-O-methyl modified nucleoside
  modified_base 3: mod_base = OTHER; note = 2'-O-methyl modified nucleoside
  modified_base 4: mod_base = OTHER; note = 2'-O-methyl modified nucleoside
  modified_base 5: mod_base = OTHER; note = 2'-O-methyl modified nucleoside
  modified_base 6: mod_base = OTHER; note = 2'-fluoro modified nucleoside
  modified_base 7: mod_base = OTHER; note = 2'-fluoro modified nucleoside
  modified_base 8: mod_base = OTHER; note = 2'-fluoro modified nucleoside
  modified_base 9: mod_base = OTHER; note = 2'-fluoro modified nucleoside
  modified_base 10: mod_base = OTHER; note = 2'-O-methyl modified nucleoside
  modified_base 11: mod_base = OTHER; note = 2'-fluoro modified nucleoside
  modified_base 12: mod_base = OTHER; note = 2'-O-methyl modified nucleoside
  modified_base 13: mod_base = OTHER; note = 2'-O-methyl modified nucleoside
  modified_base 14: mod_base = OTHER; note = 2'-O-methyl modified nucleoside
  modified_base 15: mod_base = OTHER; note = 2'-O-methyl modified nucleoside
  modified_base 16: mod_base = OTHER; note = 2'-O-methyl modified nucleoside
  modified_base 17: mod_base = OTHER; note = 2'-O-methyl modified nucleoside
  modified_base 18: mod_base = OTHER; note = 2'-O-methyl modified nucleoside
  modified_base 19: mod_base = OTHER; note = 2'-O-methyl modified nucleoside with phosphorothioate linkage
  modified_base 20: mod_base = OTHER; note = 2'-O-methyl modified nucleoside with phosphorothioate linkage
  modified_base 21: mod_base = OTHER; note = 2'-O-methyl modified nucleoside
gcggattctcttgaaaaaatt

SEQ ID NO: 3113 - RNA, 21 nt, synthetic construct
  source 1..21: mol_type = other RNA
  misc_feature 1: note = ETL17 moiety with phosphorothioate linkage
  modified_base 1: mod_base = OTHER; note = 2'-O-methyl modified nucleoside
  modified_base 2: mod_base = OTHER; note = 2'-O-methyl modified nucleoside
  modified_base 3: mod_base = OTHER; note = 2'-O-methyl modified nucleoside
  modified_base 4: mod_base = OTHER; note = 2'-O-methyl modified nucleoside
  modified_base 5: mod_base = OTHER; note = 2'-fluoro modified nucleoside
  modified_base 6: mod_base = OTHER; note = 2'-O-methyl modified nucleoside
  modified_base 7: mod_base = OTHER; note = 2'-fluoro modified nucleoside
  modified_base 8: mod_base = OTHER; note = 2'-O-methyl modified nucleoside
  modified_base 9: mod_base = OTHER; note = 2'-fluoro modified nucleoside
  modified_base 10: mod_base = OTHER; note = 2'-O-methyl modified nucleoside
  modified_base 11: mod_base = OTHER; note = 2'-fluoro modified nucleoside
  modified_base 12: mod_base = OTHER; note = 2'-O-methyl modified nucleoside
  modified_base 13: mod_base = OTHER; note = 2'-O-methyl modified nucleoside
  modified_base 14: mod_base = OTHER; note = 2'-O-methyl modified nucleoside
  modified_base 15: mod_base = OTHER; note = 2'-O-methyl modified nucleoside
  modified_base 16: mod_base = OTHER; note = 2'-O-methyl modified nucleoside
  modified_base 17: mod_base = OTHER; note = 2'-O-methyl modified nucleoside
  modified_base 18: mod_base = OTHER; note = 2'-O-methyl modified nucleoside
  modified_base 19: mod_base = OTHER; note = 2'-O-methyl modified nucleoside with phosphorothioate linkage
  modified_base 20: mod_base = OTHER; note = 2'-O-methyl modified nucleoside with phosphorothioate linkage
  modified_base 21: mod_base = OTHER; note = 2'-O-methyl modified nucleoside
agtgaaaaatacagagtgatt

SEQ ID NO: 3114 - RNA, 21 nt, synthetic construct
  source 1..21: mol_type = other RNA
  misc_feature 1: note = ETL17 moiety with phosphorothioate linkage
  modified_base 1: mod_base = OTHER; note = 2'-O-methyl modified nucleoside
  modified_base 2: mod_base = OTHER; note = 2'-O-methyl modified nucleoside
  modified_base 3: mod_base = OTHER; note = 2'-O-methyl modified nucleoside
  modified_base 4: mod_base = OTHER; note = 2'-O-methyl modified nucleoside
  modified_base 5: mod_base = OTHER; note = 2'-fluoro modified nucleoside
  modified_base 6: mod_base = OTHER; note = 2'-O-methyl modified nucleoside
  modified_base 7: mod_base = OTHER; note = 2'-fluoro modified nucleoside
  modified_base 8: mod_base = OTHER; note = 2'-O-methyl modified nucleoside
  modified_base 9: mod_base = OTHER; note = 2'-fluoro modified nucleoside
  modified_base 10: mod_base = OTHER; note = 2'-O-methyl modified nucleoside
  modified_base 11: mod_base = OTHER; note = 2'-fluoro modified nucleoside
  modified_base 12: mod_base = OTHER; note = 2'-O-methyl modified nucleoside
  modified_base 13: mod_base = OTHER; note = 2'-O-methyl modified nucleoside
  modified_base 14: mod_base = OTHER; note = 2'-O-methyl modified nucleoside
  modified_base 15: mod_base = OTHER; note = 2'-O-methyl modified nucleoside
  modified_base 16: mod_base = OTHER; note = 2'-O-methyl modified nucleoside
  modified_base 17: mod_base = OTHER; note = 2'-O-methyl modified nucleoside
  modified_base 18: mod_base = OTHER; note = 2'-O-methyl modified nucleoside
  modified_base 19: mod_base = OTHER; note = 2'-O-methyl modified nucleoside with phosphorothioate linkage
  modified_base 20: mod_base = OTHER; note = 2'-O-methyl modified nucleoside with phosphorothioate linkage
  modified_base 21: mod_base = OTHER; note = 2'-O-methyl modified nucleoside
ggcggtggaaaagtttaaatt

SEQ ID NO: 3115 - RNA, 21 nt, synthetic construct
  source 1..21: mol_type = other RNA
  misc_feature 1: note = ETL17 moiety with phosphorothioate linkage
  modified_base 1: mod_base = OTHER; note = 2'-O-methyl modified nucleoside
  modified_base 2: mod_base = OTHER; note = 2'-O-methyl modified nucleoside
  modified_base 3: mod_base = OTHER; note = 2'-O-methyl modified nucleoside
  modified_base 4: mod_base = OTHER; note = 2'-O-methyl modified nucleoside
  modified_base 5: mod_base = OTHER; note = 2'-O-methyl modified nucleoside
  modified_base 6: mod_base = OTHER; note = 2'-fluoro modified nucleoside
  modified_base 7: mod_base = OTHER; note = 2'-fluoro modified nucleoside
  modified_base 8: mod_base = OTHER; note = 2'-fluoro modified nucleoside
  modified_base 9: mod_base = OTHER; note = 2'-fluoro modified nucleoside
  modified_base 10: mod_base = OTHER; note = 2'-O-methyl modified nucleoside
  modified_base 11: mod_base = OTHER; note = 2'-fluoro modified nucleoside
  modified_base 12: mod_base = OTHER; note = 2'-O-methyl modified nucleoside
  modified_base 13: mod_base = OTHER; note = 2'-O-methyl modified nucleoside
  modified_base 14: mod_base = OTHER; note = 2'-O-methyl modified nucleoside
  modified_base 15: mod_base = OTHER; note = 2'-O-methyl modified nucleoside
  modified_base 16: mod_base = OTHER; note = 2'-O-methyl modified nucleoside
  modified_base 17: mod_base = OTHER; note = 2'-O-methyl modified nucleoside
  modified_base 18: mod_base = OTHER; note = 2'-O-methyl modified nucleoside
  modified_base 19: mod_base = OTHER; note = 2'-O-methyl modified nucleoside with phosphorothioate linkage
  modified_base 20: mod_base = OTHER; note = 2'-O-methyl modified nucleoside with phosphorothioate linkage
  modified_base 21: mod_base = OTHER; note = 2'-O-methyl modified nucleoside
gcggtggaaaagtttaaaatt

SEQ ID NO: 3116 - DNA, 21 bp, synthetic construct
  source 1..21: mol_type = other DNA
  misc_feature 1: note = ETL17 moiety with phosphorothioate linkage
  modified_base 1: mod_base = OTHER; note = 2'-O-methyl modified nucleoside
  modified_base 2: mod_base = OTHER; note = 2'-O-methyl modified nucleoside
  modified_base 3: mod_base = OTHER; note = 2'-O-methyl modified nucleoside
  modified_base 4: mod_base = OTHER; note = 2'-O-methyl modified nucleoside
  modified_base 5: mod_base = OTHER; note = 2'-fluoro modified nucleoside
  modified_base 6: mod_base = OTHER; note = 2'-O-methyl modified nucleoside
  modified_base 7: mod_base = OTHER; note = 2'-fluoro modified nucleoside
  modified_base 8: mod_base = OTHER; note = 2'-fluoro modified nucleoside
  modified_base 10: mod_base = OTHER; note = 2'-O-methyl modified nucleoside
  modified_base 11: mod_base = OTHER; note = 2'-fluoro modified nucleoside
  modified_base 12: mod_base = OTHER; note = 2'-O-methyl modified nucleoside
  modified_base 13: mod_base = OTHER; note = 2'-O-methyl modified nucleoside
  modified_base 14: mod_base = OTHER; note = 2'-O-methyl modified nucleoside
  modified_base 15: mod_base = OTHER; note = 2'-O-methyl modified nucleoside
  modified_base 16: mod_base = OTHER; note = 2'-O-methyl modified nucleoside
  modified_base 17: mod_base = OTHER; note = 2'-O-methyl modified nucleoside
  modified_base 18: mod_base = OTHER; note = 2'-O-methyl modified nucleoside
  modified_base 19: mod_base = OTHER; note = 2'-O-methyl modified nucleoside with phosphorothioate linkage
  modified_base 20: mod_base = OTHER; note = 2'-O-methyl modified nucleoside with phosphorothioate linkage
  modified_base 21: mod_base = OTHER; note = 2'-O-methyl modified nucleoside
  misc_feature 1..8: note = RNA
  misc_feature 9: note = DNA
  misc_feature 10..21: note = RNA
gtttaaagttgcctaagaatt

SEQ ID NO: 3117 - RNA, 21 nt, synthetic construct
  source 1..21: mol_type = other RNA
  misc_feature 1: note = ETL17 moiety with phosphorothioate linkage
  modified_base 1: mod_base = OTHER; note = 2'-O-methyl modified nucleoside
  modified_base 2: mod_base = OTHER; note = 2'-O-methyl modified nucleoside
  modified_base 3: mod_base = OTHER; note = 2'-O-methyl modified nucleoside
  modified_base 4: mod_base = OTHER; note = 2'-O-methyl modified nucleoside
  modified_base 5: mod_base = OTHER; note = 2'-O-methyl modified nucleoside
  modified_base 6: mod_base = OTHER; note = 2'-fluoro modified nucleoside
  modified_base 7: mod_base = OTHER; note = 2'-fluoro modified nucleoside
  modified_base 8: mod_base = OTHER; note = 2'-O-methyl modified nucleoside
  modified_base 9: mod_base = OTHER; note = 2'-fluoro modified nucleoside
  modified_base 10: mod_base = OTHER; note = 2'-O-methyl modified nucleoside
  modified_base 11: mod_base = OTHER; note = 2'-fluoro modified nucleoside
  modified_base 12: mod_base = OTHER; note = 2'-O-methyl modified nucleoside
  modified_base 13: mod_base = OTHER; note = 2'-O-methyl modified nucleoside
  modified_base 14: mod_base = OTHER; note = 2'-O-methyl modified nucleoside
  modified_base 15: mod_base = OTHER; note = 2'-O-methyl modified nucleoside
  modified_base 16: mod_base = OTHER; note = 2'-O-methyl modified nucleoside
  modified_base 17: mod_base = OTHER; note = 2'-O-methyl modified nucleoside
  modified_base 18: mod_base = OTHER; note = 2'-O-methyl modified nucleoside
  modified_base 19: mod_base = OTHER; note = 2'-O-methyl modified nucleoside with phosphorothioate linkage
  modified_base 20: mod_base = OTHER; note = 2'-O-methyl modified nucleoside with phosphorothioate linkage
  modified_base 21: mod_base = OTHER; note = 2'-O-methyl modified nucleoside
agctgctttctagtggtaatt

SEQ ID NO: 3118 - RNA, 21 nt, synthetic construct
  source 1..21: mol_type = other RNA
  misc_feature 1: note = ETL17 moiety with phosphorothioate linkage
  modified_base 1: mod_base = OTHER; note = 2'-O-methyl modified nucleoside
  modified_base 2: mod_base = OTHER; note = 2'-O-methyl modified nucleoside
  modified_base 3: mod_base = OTHER; note = 2'-O-methyl modified nucleoside
  modified_base 4: mod_base = OTHER; note = 2'-O-methyl modified nucleoside
  modified_base 5: mod_base = OTHER; note = 2'-O-methyl modified nucleoside
  modified_base 6: mod_base = OTHER; note = 2'-O-methyl modified nucleoside
  modified_base 7: mod_base = OTHER; note = 2'-fluoro modified nucleoside
  modified_base 8: mod_base = OTHER; note = 2'-fluoro modified nucleoside
  modified_base 9: mod_base = OTHER; note = 2'-fluoro modified nucleoside
  modified_base 10: mod_base = OTHER; note = 2'-fluoro modified nucleoside
  modified_base 11: mod_base = OTHER; note = 2'-O-methyl modified nucleoside
  modified_base 12: mod_base = OTHER; note = 2'-O-methyl modified nucleoside
  modified_base 13: mod_base = OTHER; note = 2'-O-methyl modified nucleoside
  modified_base 14: mod_base = OTHER; note = 2'-O-methyl modified nucleoside
  modified_base 15: mod_base = OTHER; note = 2'-O-methyl modified nucleoside
  modified_base 16: mod_base = OTHER; note = 2'-O-methyl modified nucleoside
  modified_base 17: mod_base = OTHER; note = 2'-O-methyl modified nucleoside
  modified_base 18: mod_base = OTHER; note = 2'-O-methyl modified nucleoside
  modified_base 19: mod_base = OTHER; note = 2'-O-methyl modified nucleoside with phosphorothioate linkage
  modified_base 20: mod_base = OTHER; note = 2'-O-methyl modified nucleoside with phosphorothioate linkage
  modified_base 21: mod_base = OTHER; note = 2'-O-methyl modified nucleoside
cttcctggaatcgatactatt

SEQ ID NO: 3119 - RNA, 21 nt, synthetic construct
  source 1..21: mol_type = other RNA
  misc_feature 1: note = ETL17 moiety with phosphorothioate linkage
  modified_base 1: mod_base = OTHER; note = 2'-O-methyl modified nucleoside
  modified_base 2: mod_base = OTHER; note = 2'-O-methyl modified nucleoside
  modified_base 3: mod_base = OTHER; note = 2'-O-methyl modified nucleoside
  modified_base 4: mod_base = OTHER; note = 2'-O-methyl modified nucleoside
  modified_base 5: mod_base = OTHER; note = 2'-O-methyl modified nucleoside
  modified_base 6: mod_base = OTHER; note = 2'-O-methyl modified nucleoside
  modified_base 7: mod_base = OTHER; note = 2'-fluoro modified nucleoside
  modified_base 8: mod_base = OTHER; note = 2'-fluoro modified nucleoside
  modified_base 9: mod_base = OTHER; note = 2'-fluoro modified nucleoside
  modified_base 10: mod_base = OTHER; note = 2'-fluoro modified nucleoside
  modified_base 11: mod_base = OTHER; note = 2'-O-methyl modified nucleoside
  modified_base 12: mod_base = OTHER; note = 2'-O-methyl modified nucleoside
  modified_base 13: mod_base = OTHER; note = 2'-O-methyl modified nucleoside
  modified_base 14: mod_base = OTHER; note = 2'-O-methyl modified nucleoside
  modified_base 15: mod_base = OTHER; note = 2'-O-methyl modified nucleoside
  modified_base 16: mod_base = OTHER; note = 2'-O-methyl modified nucleoside
  modified_base 17: mod_base = OTHER; note = 2'-O-methyl modified nucleoside
  modified_base 18: mod_base = OTHER; note = 2'-O-methyl modified nucleoside
  modified_base 19: mod_base = OTHER; note = 2'-O-methyl modified nucleoside with phosphorothioate linkage
  modified_base 20: mod_base = OTHER; note = 2'-O-methyl modified nucleoside with phosphorothioate linkage
  modified_base 21: mod_base = OTHER; note = 2'-O-methyl modified nucleoside
cttcctggaatcgatactatt

SEQ ID NO: 3120 - RNA, 21 nt, synthetic construct
  source 1..21: mol_type = other RNA
  misc_feature 1: note = ETL17 moiety with phosphorothioate linkage
  modified_base 1: mod_base = OTHER; note = 2'-O-methyl modified nucleoside
  modified_base 2: mod_base = OTHER; note = 2'-O-methyl modified nucleoside
  modified_base 3: mod_base = OTHER; note = 2'-O-methyl modified nucleoside
  modified_base 4: mod_base = OTHER; note = 2'-O-methyl modified nucleoside
  modified_base 5: mod_base = OTHER; note = 2'-O-methyl modified nucleoside
  modified_base 6: mod_base = OTHER; note = 2'-O-methyl modified nucleoside
  modified_base 7: mod_base = OTHER; note = 2'-fluoro modified nucleoside
  modified_base 8: mod_base = OTHER; note = 2'-fluoro modified nucleoside
  modified_base 9: mod_base = OTHER; note = 2'-fluoro modified nucleoside
  modified_base 10: mod_base = OTHER; note = 2'-fluoro modified nucleoside
  modified_base 11: mod_base = OTHER; note = 2'-O-methyl modified nucleoside
  modified_base 12: mod_base = OTHER; note = 2'-O-methyl modified nucleoside
  modified_base 13: mod_base = OTHER; note = 2'-O-methyl modified nucleoside
  modified_base 14: mod_base = OTHER; note = 2'-O-methyl modified nucleoside
  modified_base 15: mod_base = OTHER; note = 2'-O-methyl modified nucleoside
  modified_base 16: mod_base = OTHER; note = 2'-O-methyl modified nucleoside
  modified_base 17: mod_base = OTHER; note = 2'-O-methyl modified nucleoside
  modified_base 18: mod_base = OTHER; note = 2'-O-methyl modified nucleoside
  modified_base 19: mod_base = OTHER; note = 2'-O-methyl modified nucleoside with phosphorothioate linkage
  modified_base 20: mod_base = OTHER; note = 2'-O-methyl modified nucleoside with phosphorothioate linkage
  modified_base 21: mod_base = OTHER; note = 2'-O-methyl modified nucleoside
cttcctggaatcgatactatt

SEQ ID NO: 3121 - RNA, 21 nt, synthetic construct
  source 1..21: mol_type = other RNA
  misc_feature 1: note = ETL17 moiety with phosphorothioate linkage
  modified_base 1: mod_base = OTHER; note = 2'-O-methyl modified nucleoside
  modified_base 2: mod_base = OTHER; note = 2'-O-methyl modified nucleoside
  modified_base 3: mod_base = OTHER; note = 2'-O-methyl modified nucleoside
  modified_base 4: mod_base = OTHER; note = 2'-O-methyl modified nucleoside
  modified_base 5: mod_base = OTHER; note = 2'-O-methyl modified nucleoside
  modified_base 6: mod_base = OTHER; note = 2'-O-methyl modified nucleoside
  modified_base 7: mod_base = OTHER; note = 2'-fluoro modified nucleoside
  modified_base 8: mod_base = OTHER; note = 2'-fluoro modified nucleoside
  modified_base 9: mod_base = OTHER; note = 2'-fluoro modified nucleoside
  modified_base 10: mod_base = OTHER; note = 2'-fluoro modified nucleoside
  modified_base 11: mod_base = OTHER; note = 2'-O-methyl modified nucleoside
  modified_base 12: mod_base = OTHER; note = 2'-O-methyl modified nucleoside
  modified_base 13: mod_base = OTHER; note = 2'-O-methyl modified nucleoside
  modified_base 14: mod_base = OTHER; note = 2'-O-methyl modified nucleoside
  modified_base 15: mod_base = OTHER; note = 2'-O-methyl modified nucleoside
  modified_base 16: mod_base = OTHER; note = 2'-O-methyl modified nucleoside
  modified_base 17: mod_base = OTHER; note = 2'-O-methyl modified nucleoside
  modified_base 18: mod_base = OTHER; note = 2'-O-methyl modified nucleoside
  modified_base 19: mod_base = OTHER; note = 2'-O-methyl modified nucleoside with phosphorothioate linkage
  modified_base 20: mod_base = OTHER; note = 2'-O-methyl modified nucleoside with phosphorothioate linkage
  modified_base 21: mod_base = OTHER; note = 2'-O-methyl modified nucleoside
cttcctggaatcgatactatt

SEQ ID NO: 3122 - RNA, 21 nt, synthetic construct
  source 1..21: mol_type = other RNA
  misc_feature 1: note = ETL17 moiety with phosphorothioate linkage
  modified_base 1: mod_base = OTHER; note = 2'-O-methyl modified nucleoside
  modified_base 2: mod_base = OTHER; note = 2'-O-methyl modified nucleoside
  modified_base 3: mod_base = OTHER; note = 2'-O-methyl modified nucleoside
  modified_base 4: mod_base = OTHER; note = 2'-O-methyl modified nucleoside
  modified_base 5: mod_base = OTHER; note = 2'-O-methyl modified nucleoside
  modified_base 6: mod_base = OTHER; note = 2'-O-methyl modified nucleoside
  modified_base 7: mod_base = OTHER; note = 2'-fluoro modified nucleoside
  modified_base 8: mod_base = OTHER; note = 2'-fluoro modified nucleoside
  modified_base 9: mod_base = OTHER; note = 2'-fluoro modified nucleoside
  modified_base 10: mod_base = OTHER; note = 2'-fluoro modified nucleoside
  modified_base 11: mod_base = OTHER; note = 2'-O-methyl modified nucleoside
  modified_base 12: mod_base = OTHER; note = 2'-O-methyl modified nucleoside
  modified_base 13: mod_base = OTHER; note = 2'-O-methyl modified nucleoside
  modified_base 14: mod_base = OTHER; note = 2'-O-methyl modified nucleoside
  modified_base 15: mod_base = OTHER; note = 2'-O-methyl modified nucleoside
  modified_base 16: mod_base = OTHER; note = 2'-O-methyl modified nucleoside
  modified_base 17: mod_base = OTHER; note = 2'-O-methyl modified nucleoside
  modified_base 18: mod_base = OTHER; note = 2'-O-methyl modified nucleoside
  modified_base 19: mod_base = OTHER; note = 2'-O-methyl modified nucleoside with phosphorothioate linkage
  modified_base 20: mod_base = OTHER; note = 2'-O-methyl modified nucleoside with phosphorothioate linkage
  modified_base 21: mod_base = OTHER; note = 2'-O-methyl modified nucleoside
cttcctggaatcgatactatt

SEQ ID NO: 3123 - RNA, 21 nt, synthetic construct
  source 1..21: mol_type = other RNA
  misc_feature 1: note = ETL17 moiety with phosphorothioate linkage
  modified_base 1: mod_base = OTHER; note = 2'-O-methyl modified nucleoside
  modified_base 2: mod_base = OTHER; note = 2'-O-methyl modified nucleoside
  modified_base 3: mod_base = OTHER; note = 2'-O-methyl modified nucleoside
  modified_base 4: mod_base = OTHER; note = 2'-O-methyl modified nucleoside
  modified_base 5: mod_base = OTHER; note = 2'-O-methyl modified nucleoside
  modified_base 6: mod_base = OTHER; note = 2'-O-methyl modified nucleoside
  modified_base 7: mod_base = OTHER; note = 2'-fluoro modified nucleoside
  modified_base 8: mod_base = OTHER; note = 2'-fluoro modified nucleoside
  modified_base 9: mod_base = OTHER; note = 2'-fluoro modified nucleoside
  modified_base 10: mod_base = OTHER; note = 2'-fluoro modified nucleoside
  modified_base 11: mod_base = OTHER; note = 2'-O-methyl modified nucleoside
  modified_base 12: mod_base = OTHER; note = 2'-O-methyl modified nucleoside
  modified_base 13: mod_base = OTHER; note = 2'-O-methyl modified nucleoside
  modified_base 14: mod_base = OTHER; note = 2'-O-methyl modified nucleoside
  modified_base 15: mod_base = OTHER; note = 2'-O-methyl modified nucleoside
  modified_base 16: mod_base = OTHER; note = 2'-O-methyl modified nucleoside
  modified_base 17: mod_base = OTHER; note = 2'-O-methyl modified nucleoside
  modified_base 18: mod_base = OTHER; note = 2'-O-methyl modified nucleoside
  modified_base 19: mod_base = OTHER; note = 2'-O-methyl modified nucleoside with phosphorothioate linkage
  modified_base 20: mod_base = OTHER; note = 2'-O-methyl modified nucleoside with phosphorothioate linkage
  modified_base 21: mod_base = OTHER; note = 2'-O-methyl modified nucleoside
cttcctggaatcgatactatt

SEQ ID NO: 3124 - RNA, 21 nt, synthetic construct
  source 1..21: mol_type = other RNA
  misc_feature 1: note = ETL17 moiety with phosphorothioate linkage
  modified_base 1: mod_base = OTHER; note = 2'-O-methyl modified nucleoside
  modified_base 2: mod_base = OTHER; note = 2'-O-methyl modified nucleoside
  modified_base 3: mod_base = OTHER; note = 2'-O-methyl modified nucleoside
  modified_base 4: mod_base = OTHER; note = 2'-O-methyl modified nucleoside
  modified_base 5: mod_base = OTHER; note = 2'-O-methyl modified nucleoside
  modified_base 6: mod_base = OTHER; note = 2'-O-methyl modified nucleoside
  modified_base 7: mod_base = OTHER; note = 2'-fluoro modified nucleoside
  modified_base 8: mod_base = OTHER; note = 2'-fluoro modified nucleoside
  modified_base 9: mod_base = OTHER; note = 2'-fluoro modified nucleoside
  modified_base 10: mod_base = OTHER; note = 2'-fluoro modified nucleoside
  modified_base 11: mod_base = OTHER; note = 2'-O-methyl modified nucleoside
  modified_base 12: mod_base = OTHER; note = 2'-O-methyl modified nucleoside
  modified_base 13: mod_base = OTHER; note = 2'-O-methyl modified nucleoside
  modified_base 14: mod_base = OTHER; note = 2'-O-methyl modified nucleoside
  modified_base 15: mod_base = OTHER; note = 2'-O-methyl modified nucleoside
  modified_base 16: mod_base = OTHER; note = 2'-O-methyl modified nucleoside
  modified_base 17: mod_base = OTHER; note = 2'-O-methyl modified nucleoside
  modified_base 18: mod_base = OTHER; note = 2'-O-methyl modified nucleoside
  modified_base 19: mod_base = OTHER; note = 2'-O-methyl modified nucleoside with phosphorothioate linkage
  modified_base 20: mod_base = OTHER; note = 2'-O-methyl modified nucleoside with phosphorothioate linkage
  modified_base 21: mod_base = OTHER; note = 2'-O-methyl modified nucleoside
cttcctggaatcgatactatt

SEQ ID NO: 3125 - RNA, 21 nt, synthetic construct
  source 1..21: mol_type = other RNA
  modified_base 1: mod_base = OTHER; note = 2'-O-methyl modified nucleoside with phosphorothioate linkage
  modified_base 2: mod_base = OTHER; note = 2'-fluoro modified nucleoside with phosphorothioate linkage
  modified_base 3: mod_base = OTHER; note = 2'-O-methyl modified nucleoside
  modified_base 4: mod_base = OTHER; note = 2'-O-methyl modified nucleoside
  modified_base 5: mod_base = OTHER; note = 2'-O-methyl modified nucleoside
  modified_base 6: mod_base = OTHER; note = 2'-fluoro modified nucleoside
  modified_base 7: mod_base = OTHER; note = 2'-O-methyl modified nucleoside
  modified_base 8: mod_base = OTHER; note = 2'-fluoro modified nucleoside
  modified_base 9: mod_base = OTHER; note = 2'-O-methyl modified nucleoside
  modified_base 10: mod_base = OTHER; note = 2'-O-methyl modified nucleoside
  modified_base 11: mod_base = OTHER; note = 2'-O-methyl modified nucleoside
  modified_base 12: mod_base = OTHER; note = 2'-O-methyl modified nucleoside
  modified_base 13: mod_base = OTHER; note = 2'-O-methyl modified nucleoside
  modified_base 14: mod_base = OTHER; note = 2'-fluoro modified nucleoside
  modified_base 15: mod_base = OTHER; note = 2'-O-methyl modified nucleoside
  modified_base 16: mod_base = OTHER; note = 2'-fluoro modified nucleoside
  modified_base 17: mod_base = OTHER; note = 2'-O-methyl modified nucleoside
  modified_base 18: mod_base = OTHER; note = 2'-O-methyl modified nucleoside
  modified_base 19: mod_base = OTHER; note = 2'-O-methyl modified nucleoside with phosphorothioate linkage
  modified_base 20: mod_base = OTHER; note = 2'-O-methyl modified nucleoside with phosphorothioate linkage
  modified_base 21: mod_base = OTHER; note = 2'-O-methyl modified nucleoside
tctgagttcacctttgtagtt

SEQ ID NO: 3126 - RNA, 21 nt, synthetic construct
  source 1..21: mol_type = other RNA
  modified_base 1: mod_base = OTHER; note = 2'-O-methyl modified nucleoside with phosphorothioate linkage
  modified_base 2: mod_base = OTHER; note = 2'-fluoro modified nucleoside with phosphorothioate linkage
  modified_base 3: mod_base = OTHER; note = 2'-O-methyl modified nucleoside
  modified_base 4: mod_base = OTHER; note = 2'-fluoro modified nucleoside
  modified_base 5: mod_base = OTHER; note = 2'-O-methyl modified nucleoside
  modified_base 6: mod_base = OTHER; note = 2'-fluoro modified nucleoside
  modified_base 7: mod_base = OTHER; note = 2'-O-methyl modified nucleoside
  modified_base 8: mod_base = OTHER; note = 2'-fluoro modified nucleoside
  modified_base 9: mod_base = OTHER; note = 2'-O-methyl modified nucleoside
  modified_base 10: mod_base = OTHER; note = 2'-fluoro modified nucleoside
  modified_base 11: mod_base = OTHER; note = 2'-O-methyl modified nucleoside
  modified_base 12: mod_base = OTHER; note = 2'-fluoro modified nucleoside
  modified_base 13: mod_base = OTHER; note = 2'-O-methyl modified nucleoside
  modified_base 14: mod_base = OTHER; note = 2'-fluoro modified nucleoside
  modified_base 15: mod_base = OTHER; note = 2'-O-methyl modified nucleoside
  modified_base 16: mod_base = OTHER; note = 2'-fluoro modified nucleoside
  modified_base 17: mod_base = OTHER; note = 2'-O-methyl modified nucleoside
  modified_base 18: mod_base = OTHER; note = 2'-fluoro modified nucleoside
  modified_base 19: mod_base = OTHER; note = 2'-O-methyl modified nucleoside with phosphorothioate linkage
  modified_base 20: mod_base = OTHER; note = 2'-O-methyl modified nucleoside with phosphorothioate linkage
  modified_base 21: mod_base = OTHER; note = 2'-O-methyl modified nucleoside
ttttggagtttatattgcttt

SEQ ID NO: 3127 - RNA, 21 nt, synthetic construct
  source 1..21: mol_type = other RNA
  modified_base 1: mod_base = OTHER; note = 2'-O-methyl modified nucleoside with phosphorothioate linkage
  modified_base 2: mod_base = OTHER; note = 2'-fluoro modified nucleoside with phosphorothioate linkage
  modified_base 3: mod_base = OTHER; note = 2'-O-methyl modified nucleoside
  modified_base 4: mod_base = OTHER; note = 2'-fluoro modified nucleoside
  modified_base 5: mod_base = OTHER; note = 2'-O-methyl modified nucleoside
  modified_base 6: mod_base = OTHER; note = 2'-fluoro modified nucleoside
  modified_base 7: mod_base = OTHER; note = 2'-O-methyl modified nucleoside
  modified_base 8: mod_base = OTHER; note = 2'-fluoro modified nucleoside
  modified_base 9: mod_base = OTHER; note = 2'-O-methyl modified nucleoside
  modified_base 10: mod_base = OTHER; note = 2'-fluoro modified nucleoside
  modified_base 11: mod_base = OTHER; note = 2'-O-methyl modified nucleoside
  modified_base 12: mod_base = OTHER; note = 2'-fluoro modified nucleoside
  modified_base 13: mod_base = OTHER; note = 2'-O-methyl modified nucleoside
  modified_base 14: mod_base = OTHER; note = 2'-fluoro modified nucleoside
  modified_base 15: mod_base = OTHER; note = 2'-O-methyl modified nucleoside
  modified_base 16: mod_base = OTHER; note = 2'-fluoro modified nucleoside
  modified_base 17: mod_base = OTHER; note = 2'-O-methyl modified nucleoside
  modified_base 18: mod_base = OTHER; note = 2'-fluoro modified nucleoside
  modified_base 19: mod_base = OTHER; note = 2'-O-methyl modified nucleoside with phosphorothioate linkage
  modified_base 20: mod_base = OTHER; note = 2'-O-methyl modified nucleoside with phosphorothioate linkage
  modified_base 21: mod_base = OTHER; note = 2'-O-methyl modified nucleoside
tagtatcgattccaggaagtt

SEQ ID NO: 3128 - RNA, 21 nt, synthetic construct
  source 1..21: mol_type = other RNA
  modified_base 1: mod_base = OTHER; note = 2'-O-methyl modified nucleoside with phosphorothioate linkage
  modified_base 2: mod_base = OTHER; note = 2'-fluoro modified nucleoside with phosphorothioate linkage
  modified_base 3: mod_base = OTHER; note = 2'-O-methyl modified nucleoside
  modified_base 4: mod_base = OTHER; note = 2'-fluoro modified nucleoside
  modified_base 5: mod_base = OTHER; note = 2'-O-methyl modified nucleoside
  modified_base 6: mod_base = OTHER; note = 2'-fluoro modified nucleoside
  modified_base 7: mod_base = OTHER; note = 2'-O-methyl modified nucleoside
  modified_base 8: mod_base = OTHER; note = 2'-fluoro modified nucleoside
  modified_base 9: mod_base = OTHER; note = 2'-O-methyl modified nucleoside
  modified_base 10: mod_base = OTHER; note = 2'-fluoro modified nucleoside
  modified_base 11: mod_base = OTHER; note = 2'-O-methyl modified nucleoside
  modified_base 12: mod_base = OTHER; note = 2'-fluoro modified nucleoside
  modified_base 13: mod_base = OTHER; note = 2'-O-methyl modified nucleoside
  modified_base 14: mod_base = OTHER; note = 2'-fluoro modified nucleoside
  modified_base 15: mod_base = OTHER; note = 2'-O-methyl modified nucleoside
  modified_base 16: mod_base = OTHER; note = 2'-fluoro modified nucleoside
  modified_base 17: mod_base = OTHER; note = 2'-O-methyl modified nucleoside
  modified_base 18: mod_base = OTHER; note = 2'-fluoro modified nucleoside
  modified_base 19: mod_base = OTHER; note = 2'-O-methyl modified nucleoside with phosphorothioate linkage
  modified_base 20: mod_base = OTHER; note = 2'-O-methyl modified nucleoside with phosphorothioate linkage
  modified_base 21: mod_base = OTHER; note = 2'-O-methyl modified nucleoside
taagtatcgattccaggaatt

SEQ ID NO: 3129 - RNA, 21 nt, synthetic construct
  source 1..21: mol_type = other RNA
  modified_base 1: mod_base = OTHER; note = 2'-O-methyl modified nucleoside with phosphorothioate linkage
  modified_base 2: mod_base = OTHER; note = 2'-fluoro modified nucleoside with phosphorothioate linkage
  modified_base 3: mod_base = OTHER; note = 2'-O-methyl modified nucleoside
  modified_base 4: mod_base = OTHER; note = 2'-fluoro modified nucleoside
  modified_base 5: mod_base = OTHER; note = 2'-O-methyl modified nucleoside
  modified_base 6: mod_base = OTHER; note = 2'-fluoro modified nucleoside
  modified_base 7: mod_base = OTHER; note = 2'-O-methyl modified nucleoside
  modified_base 8: mod_base = OTHER; note = 2'-fluoro modified nucleoside
  modified_base 9: mod_base = OTHER; note = 2'-O-methyl modified nucleoside
  modified_base 10: mod_base = OTHER; note = 2'-fluoro modified nucleoside
  modified_base 11: mod_base = OTHER; note = 2'-O-methyl modified nucleoside
  modified_base 12: mod_base = OTHER; note = 2'-fluoro modified nucleoside
  modified_base 13: mod_base = OTHER; note = 2'-O-methyl modified nucleoside
  modified_base 14: mod_base = OTHER; note = 2'-fluoro modified nucleoside
  modified_base 15: mod_base = OTHER; note = 2'-O-methyl modified nucleoside
  modified_base 16: mod_base = OTHER; note = 2'-fluoro modified nucleoside
  modified_base 17: mod_base = OTHER; note = 2'-O-methyl modified nucleoside
  modified_base 18: mod_base = OTHER; note = 2'-fluoro modified nucleoside
  modified_base 19: mod_base = OTHER; note = 2'-O-methyl modified nucleoside with phosphorothioate linkage
  modified_base 20: mod_base = OTHER; note = 2'-O-methyl modified nucleoside with phosphorothioate linkage
  modified_base 21: mod_base = OTHER; note = 2'-O-methyl modified nucleoside
tcaagtatcgattccaggatt

SEQ ID NO: 3130 - RNA, 21 nt, synthetic construct
  source 1..21: mol_type = other RNA
  modified_base 1: mod_base = OTHER; note = 2'-O-methyl modified nucleoside with phosphorothioate linkage
  modified_base 2: mod_base = OTHER; note = 2'-fluoro modified nucleoside with phosphorothioate linkage
  modified_base 3: mod_base = OTHER; note = 2'-O-methyl modified nucleoside
  modified_base 4: mod_base = OTHER; note = 2'-fluoro modified nucleoside
  modified_base 5: mod_base = OTHER; note = 2'-O-methyl modified nucleoside
  modified_base 6: mod_base = OTHER; note = 2'-fluoro modified nucleoside
  modified_base 7: mod_base = OTHER; note = 2'-O-methyl modified nucleoside
  modified_base 8: mod_base = OTHER; note = 2'-fluoro modified nucleoside
  modified_base 9: mod_base = OTHER; note = 2'-O-methyl modified nucleoside
  modified_base 10: mod_base = OTHER; note = 2'-fluoro modified nucleoside
  modified_base 11: mod_base = OTHER; note = 2'-O-methyl modified nucleoside
  modified_base 12: mod_base = OTHER; note = 2'-fluoro modified nucleoside
  modified_base 13: mod_base = OTHER; note = 2'-O-methyl modified nucleoside
  modified_base 14: mod_base = OTHER; note = 2'-fluoro modified nucleoside
  modified_base 15: mod_base = OTHER; note = 2'-O-methyl modified nucleoside
  modified_base 16: mod_base = OTHER; note = 2'-fluoro modified nucleoside
  modified_base 17: mod_base = OTHER; note = 2'-O-methyl modified nucleoside
  modified_base 18: mod_base = OTHER; note = 2'-fluoro modified nucleoside
  modified_base 19: mod_base = OTHER; note = 2'-O-methyl modified nucleoside with phosphorothioate linkage
  modified_base 20: mod_base = OTHER; note = 2'-O-methyl modified nucleoside with phosphorothioate linkage
  modified_base 21: mod_base = OTHER; note = 2'-O-methyl modified nucleoside
tacaagtatcgattccaggtt

SEQ ID NO: 3131 - RNA, 21 nt, synthetic construct
  source 1..21: mol_type = other RNA
  modified_base 1: mod_base = OTHER; note = 2'-O-methyl modified nucleoside with phosphorothioate linkage
  modified_base 2: mod_base = OTHER; note = 2'-fluoro modified nucleoside with phosphorothioate linkage
  modified_base 3: mod_base = OTHER; note = 2'-O-methyl modified nucleoside
  modified_base 4: mod_base = OTHER; note = 2'-fluoro modified nucleoside
  modified_base 5: mod_base = OTHER; note = 2'-O-methyl modified nucleoside
  modified_base 6: mod_base = OTHER; note = 2'-fluoro modified nucleoside
  modified_base 7: mod_base = OTHER; note = 2'-O-methyl modified nucleoside
  modified_base 8: mod_base = OTHER; note = 2'-fluoro modified nucleoside
  modified_base 9: mod_base = OTHER; note = 2'-O-methyl modified nucleoside
  modified_base 10: mod_base = OTHER; note = 2'-fluoro modified nucleoside
  modified_base 11: mod_base = OTHER; note = 2'-O-methyl modified nucleoside
  modified_base 12: mod_base = OTHER; note = 2'-fluoro modified nucleoside
  modified_base 13: mod_base = OTHER; note = 2'-O-methyl modified nucleoside
  modified_base 14: mod_base = OTHER; note = 2'-fluoro modified nucleoside
  modified_base 15: mod_base = OTHER; note = 2'-O-methyl modified nucleoside
  modified_base 16: mod_base = OTHER; note = 2'-fluoro modified nucleoside
  modified_base 17: mod_base = OTHER; note = 2'-O-methyl modified nucleoside
  modified_base 18: mod_base = OTHER; note = 2'-fluoro modified nucleoside
  modified_base 19: mod_base = OTHER; note = 2'-O-methyl modified nucleoside with phosphorothioate linkage
  modified_base 20: mod_base = OTHER; note = 2'-O-methyl modified nucleoside with phosphorothioate linkage
  modified_base 21: mod_base = OTHER; note = 2'-O-methyl modified nucleoside
tggtactagaaaaatacaatt

SEQ ID NO: 3132 - RNA, 21 nt, synthetic construct
  source 1..21: mol_type = other RNA
  modified_base 1: mod_base = OTHER; note = 2'-O-methyl modified nucleoside with phosphorothioate linkage
  modified_base 2: mod_base = OTHER; note = 2'-fluoro modified nucleoside with phosphorothioate linkage
  modified_base 3: mod_base = OTHER; note = 2'-O-methyl modified nucleoside
  modified_base 4: mod_base = OTHER; note = 2'-fluoro modified nucleoside
  modified_base 5: mod_base = OTHER; note = 2'-O-methyl modified nucleoside
  modified_base 6: mod_base = OTHER; note = 2'-fluoro modified nucleoside
  modified_base 7: mod_base = OTHER; note = 2'-O-methyl modified nucleoside
  modified_base 8: mod_base = OTHER; note = 2'-fluoro modified nucleoside
  modified_base 9: mod_base = OTHER; note = 2'-O-methyl modified nucleoside
  modified_base 10: mod_base = OTHER; note = 2'-fluoro modified nucleoside
  modified_base 11: mod_base = OTHER; note = 2'-O-methyl modified nucleoside
  modified_base 12: mod_base = OTHER; note = 2'-fluoro modified nucleoside
  modified_base 13: mod_base = OTHER; note = 2'-O-methyl modified nucleoside
  modified_base 14: mod_base = OTHER; note = 2'-fluoro modified nucleoside
  modified_base 15: mod_base = OTHER; note = 2'-O-methyl modified nucleoside
  modified_base 16: mod_base = OTHER; note = 2'-fluoro modified nucleoside
  modified_base 17: mod_base = OTHER; note = 2'-O-methyl modified nucleoside
  modified_base 18: mod_base = OTHER; note = 2'-fluoro modified nucleoside
  modified_base 19: mod_base = OTHER; note = 2'-O-methyl modified nucleoside with phosphorothioate linkage
  modified_base 20: mod_base = OTHER; note = 2'-O-methyl modified nucleoside with phosphorothioate linkage
  modified_base 21: mod_base = OTHER; note = 2'-O-methyl modified nucleoside
ttgagttcacctttgtagatt

SEQ ID NO: 3133 - RNA, 21 nt, synthetic construct
  source 1..21: mol_type = other RNA
  modified_base 1: mod_base = OTHER; note = 2'-O-methyl modified nucleoside with phosphorothioate linkage
  modified_base 2: mod_base = OTHER; note = 2'-fluoro modified nucleoside with phosphorothioate linkage
  modified_base 3: mod_base = OTHER; note = 2'-O-methyl modified nucleoside
  modified_base 4: mod_base = OTHER; note = 2'-fluoro modified nucleoside
  modified_base 5: mod_base = OTHER; note = 2'-O-methyl modified nucleoside
  modified_base 6: mod_base = OTHER; note = 2'-fluoro modified nucleoside
  modified_base 7: mod_base = OTHER; note = 2'-O-methyl modified nucleoside
  modified_base 8: mod_base = OTHER; note = 2'-fluoro modified nucleoside
  modified_base 9: mod_base = OTHER; note = 2'-O-methyl modified nucleoside
  modified_base 10: mod_base = OTHER; note = 2'-fluoro modified nucleoside
  modified_base 11: mod_base = OTHER; note = 2'-O-methyl modified nucleoside
  modified_base 12: mod_base = OTHER; note = 2'-fluoro modified nucleoside
  modified_base 13: mod_base = OTHER; note = 2'-O-methyl modified nucleoside
  modified_base 14: mod_base = OTHER; note = 2'-fluoro modified nucleoside
  modified_base 15: mod_base = OTHER; note = 2'-O-methyl modified nucleoside
  modified_base 16: mod_base = OTHER; note = 2'-fluoro modified nucleoside
  modified_base 17: mod_base = OTHER; note = 2'-O-methyl modified nucleoside
  modified_base 18: mod_base = OTHER; note = 2'-fluoro modified nucleoside
  modified_base 19: mod_base = OTHER; note = 2'-O-methyl modified nucleoside with phosphorothioate linkage
  modified_base 20: mod_base = OTHER; note = 2'-O-methyl modified nucleoside with phosphorothioate linkage
  modified_base 21: mod_base = OTHER; note = 2'-O-methyl modified nucleoside
tagcctgagttcacctttgtt

SEQ ID NO: 3134 - RNA, 21 nt, synthetic construct
  source 1..21: mol_type = other RNA
  modified_base 1: mod_base = OTHER; note = 2'-O-methyl modified nucleoside with phosphorothioate linkage
  modified_base 2: mod_base = OTHER; note = 2'-fluoro modified nucleoside with phosphorothioate linkage
  modified_base 3: mod_base = OTHER; note = 2'-O-methyl modified nucleoside
  modified_base 4: mod_base = OTHER; note = 2'-fluoro modified nucleoside
  modified_base 5: mod_base = OTHER; note = 2'-O-methyl modified nucleoside
  modified_base 6: mod_base = OTHER; note = 2'-fluoro modified nucleoside
  modified_base 7: mod_base = OTHER; note = 2'-O-methyl modified nucleoside
  modified_base 8: mod_base = OTHER; note = 2'-fluoro modified nucleoside
  modified_base 9: mod_base = OTHER; note = 2'-O-methyl modified nucleoside
  modified_base 10: mod_base = OTHER; note = 2'-fluoro modified nucleoside
  modified_base 11: mod_base = OTHER; note = 2'-O-methyl modified nucleoside
  modified_base 12: mod_base = OTHER; note = 2'-fluoro modified nucleoside
  modified_base 13: mod_base = OTHER; note = 2'-O-methyl modified nucleoside
  modified_base 14: mod_base = OTHER; note = 2'-fluoro modified nucleoside
  modified_base 15: mod_base = OTHER; note = 2'-O-methyl modified nucleoside
  modified_base 16: mod_base = OTHER; note = 2'-fluoro modified nucleoside
  modified_base 17: mod_base = OTHER; note = 2'-O-methyl modified nucleoside
  modified_base 18: mod_base = OTHER; note = 2'-fluoro modified nucleoside
  modified_base 19: mod_base = OTHER; note = 2'-O-methyl modified nucleoside with phosphorothioate linkage
  modified_base 20: mod_base = OTHER; note = 2'-O-methyl modified nucleoside with phosphorothioate linkage
  modified_base 21: mod_base = OTHER; note = 2'-O-methyl modified nucleoside
taccgttctgcttttcttctt

SEQ ID NO: 3135 - RNA, 21 nt, synthetic construct
  source 1..21: mol_type = other RNA
  modified_base 1: mod_base = OTHER; note = 2'-O-methyl modified nucleoside with phosphorothioate linkage
  modified_base 2: mod_base = OTHER; note = 2'-fluoro modified nucleoside with phosphorothioate linkage
  modified_base 3: mod_base = OTHER; note = 2'-O-methyl modified nucleoside
  modified_base 4: mod_base = OTHER; note = 2'-fluoro modified nucleoside
  modified_base 5: mod_base = OTHER; note = 2'-O-methyl modified nucleoside
  modified_base 6: mod_base = OTHER; note = 2'-fluoro modified nucleoside
  modified_base 7: mod_base = OTHER; note = 2'-O-methyl modified nucleoside
  modified_base 8: mod_base = OTHER; note = 2'-fluoro modified nucleoside
  modified_base 9: mod_base = OTHER; note = 2'-O-methyl modified nucleoside
  modified_base 10: mod_base = OTHER; note = 2'-fluoro modified nucleoside
  modified_base 11: mod_base = OTHER; note = 2'-O-methyl modified nucleoside
  modified_base 12: mod_base = OTHER; note = 2'-fluoro modified nucleoside
  modified_base 13: mod_base = OTHER; note = 2'-O-methyl modified nucleoside
  modified_base 14: mod_base = OTHER; note = 2'-fluoro modified nucleoside
  modified_base 15: mod_base = OTHER; note = 2'-O-methyl modified nucleoside
  modified_base 16: mod_base = OTHER; note = 2'-fluoro modified nucleoside
  modified_base 17: mod_base = OTHER; note = 2'-O-methyl modified nucleoside
  modified_base 18: mod_base = OTHER; note = 2'-fluoro modified nucleoside
  modified_base 19: mod_base = OTHER; note = 2'-O-methyl modified nucleoside with phosphorothioate linkage
  modified_base 20: mod_base = OTHER; note = 2'-O-methyl modified nucleoside with phosphorothioate linkage
  modified_base 21: mod_base = OTHER; note = 2'-O-methyl modified nucleoside
tcaccgttctgcttttctttt

SEQ ID NO: 3136 - RNA, 21 nt, synthetic construct
  source 1..21: mol_type = other RNA
  modified_base 1: mod_base = OTHER; note = 2'-O-methyl modified nucleoside with phosphorothioate linkage
  modified_base 2: mod_base = OTHER; note = 2'-fluoro modified nucleoside with phosphorothioate linkage
  modified_base 3: mod_base = OTHER; note = 2'-O-methyl modified nucleoside
  modified_base 4: mod_base = OTHER; note = 2'-fluoro modified nucleoside
  modified_base 5: mod_base = OTHER; note = 2'-O-methyl modified nucleoside
  modified_base 6: mod_base = OTHER; note = 2'-fluoro modified nucleoside
  modified_base 7: mod_base = OTHER; note = 2'-O-methyl modified nucleoside
  modified_base 8: mod_base = OTHER; note = 2'-fluoro modified nucleoside
  modified_base 9: mod_base = OTHER; note = 2'-O-methyl modified nucleoside
  modified_base 10: mod_base = OTHER; note = 2'-fluoro modified nucleoside
  modified_base 11: mod_base = OTHER; note = 2'-O-methyl modified nucleoside
  modified_base 12: mod_base = OTHER; note = 2'-fluoro modified nucleoside
  modified_base 13: mod_base = OTHER; note = 2'-O-methyl modified nucleoside
  modified_base 14: mod_base = OTHER; note = 2'-fluoro modified nucleoside
  modified_base 15: mod_base = OTHER; note = 2'-O-methyl modified nucleoside
  modified_base 16: mod_base = OTHER; note = 2'-fluoro modified nucleoside
  modified_base 17: mod_base = OTHER; note = 2'-O-methyl modified nucleoside
  modified_base 18: mod_base = OTHER; note = 2'-fluoro modified nucleoside
  modified_base 19: mod_base = OTHER; note = 2'-O-methyl modified nucleoside with phosphorothioate linkage
  modified_base 20: mod_base = OTHER; note = 2'-O-methyl modified nucleoside with phosphorothioate linkage
  modified_base 21: mod_base = OTHER; note = 2'-O-methyl modified nucleoside
tttcaccgttctgcttttctt

SEQ ID NO: 3137 - RNA, 21 nt, synthetic construct
  source 1..21: mol_type = other RNA
  modified_base 1: mod_base = OTHER; note = 2'-O-methyl modified nucleoside with phosphorothioate linkage
  modified_base 2: mod_base = OTHER; note = 2'-fluoro modified nucleoside with phosphorothioate linkage
  modified_base 3: mod_base = OTHER; note = 2'-O-methyl modified nucleoside
  modified_base 4: mod_base = OTHER; note = 2'-fluoro modified nucleoside
  modified_base 5: mod_base = OTHER; note = 2'-O-methyl modified nucleoside
  modified_base 6: mod_base = OTHER; note = 2'-fluoro modified nucleoside
  modified_base 7: mod_base = OTHER; note = 2'-O-methyl modified nucleoside
  modified_base 8: mod_base = OTHER; note = 2'-fluoro modified nucleoside
  modified_base 9: mod_base = OTHER; note = 2'-O-methyl modified nucleoside
  modified_base 10: mod_base = OTHER; note = 2'-fluoro modified nucleoside
  modified_base 11: mod_base = OTHER; note = 2'-O-methyl modified nucleoside
  modified_base 12: mod_base = OTHER; note = 2'-fluoro modified nucleoside
  modified_base 13: mod_base = OTHER; note = 2'-O-methyl modified nucleoside
  modified_base 14: mod_base = OTHER; note = 2'-fluoro modified nucleoside
  modified_base 15: mod_base = OTHER; note = 2'-O-methyl modified nucleoside
  modified_base 16: mod_base = OTHER; note = 2'-fluoro modified nucleoside
  modified_base 17: mod_base = OTHER; note = 2'-O-methyl modified nucleoside
  modified_base 18: mod_base = OTHER; note = 2'-fluoro modified nucleoside
  modified_base 19: mod_base = OTHER; note = 2'-O-methyl modified nucleoside with phosphorothioate linkage
  modified_base 20: mod_base = OTHER; note = 2'-O-methyl modified nucleoside with phosphorothioate linkage
  modified_base 21: mod_base = OTHER; note = 2'-O-methyl modified nucleoside
tcccactttcaccgttctgtt

SEQ ID NO: 3138 - RNA, 21 nt, synthetic construct
  source 1..21: mol_type = other RNA
  modified_base 1: mod_base = OTHER; note = 2'-O-methyl modified nucleoside with phosphorothioate linkage
  modified_base 2: mod_base = OTHER; note = 2'-fluoro modified nucleoside with phosphorothioate linkage
  modified_base 3: mod_base = OTHER; note = 2'-O-methyl modified nucleoside
  modified_base 4: mod_base = OTHER; note = 2'-fluoro modified nucleoside
  modified_base 5: mod_base = OTHER; note = 2'-O-methyl modified nucleoside
  modified_base 6: mod_base = OTHER; note = 2'-fluoro modified nucleoside
  modified_base 7: mod_base = OTHER; note = 2'-O-methyl modified nucleoside
  modified_base 8: mod_base = OTHER; note = 2'-fluoro modified nucleoside
  modified_base 9: mod_base = OTHER; note = 2'-O-methyl modified nucleoside
  modified_base 10: mod_base = OTHER; note = 2'-fluoro modified nucleoside
  modified_base 11: mod_base = OTHER; note = 2'-O-methyl modified nucleoside
  modified_base 12: mod_base = OTHER; note = 2'-fluoro modified nucleoside
  modified_base 13: mod_base = OTHER; note = 2'-O-methyl modified nucleoside
  modified_base 14: mod_base = OTHER; note = 2'-fluoro modified nucleoside
  modified_base 15: mod_base = OTHER; note = 2'-O-methyl modified nucleoside
  modified_base 16: mod_base = OTHER; note = 2'-fluoro modified nucleoside
  modified_base 17: mod_base = OTHER; note = 2'-O-methyl modified nucleoside
  modified_base 18: mod_base = OTHER; note = 2'-fluoro modified nucleoside
  modified_base 19: mod_base = OTHER; note = 2'-O-methyl modified nucleoside with phosphorothioate linkage
  modified_base 20: mod_base = OTHER; note = 2'-O-methyl modified nucleoside with phosphorothioate linkage
  modified_base 21: mod_base = OTHER; note = 2'-O-methyl modified nucleoside
ttgagttcacctttgtagatt

SEQ ID NO: 3139 - RNA, 21 nt, synthetic construct
  source 1..21: mol_type = other RNA
  modified_base 1: mod_base = OTHER; note = 2'-O-methyl modified nucleoside with phosphorothioate linkage
  modified_base 2: mod_base = OTHER; note = 2'-fluoro modified nucleoside with phosphorothioate linkage
  modified_base 3: mod_base = OTHER; note = 2'-O-methyl modified nucleoside
  modified_base 4: mod_base = OTHER; note = 2'-fluoro modified nucleoside
  modified_base 5: mod_base = OTHER; note = 2'-O-methyl modified nucleoside
  modified_base 6: mod_base = OTHER; note = 2'-fluoro modified nucleoside
  modified_base 7: mod_base = OTHER; note = 2'-O-methyl modified nucleoside
  modified_base 8: mod_base = OTHER; note = 2'-fluoro modified nucleoside
  modified_base 9: mod_base = OTHER; note = 2'-O-methyl modified nucleoside
  modified_base 10: mod_base = OTHER; note = 2'-fluoro modified nucleoside
  modified_base 11: mod_base = OTHER; note = 2'-O-methyl modified nucleoside
  modified_base 12: mod_base = OTHER; note = 2'-fluoro modified nucleoside
  modified_base 13: mod_base = OTHER; note = 2'-O-methyl modified nucleoside
  modified_base 14: mod_base = OTHER; note = 2'-fluoro modified nucleoside
  modified_base 15: mod_base = OTHER; note = 2'-O-methyl modified nucleoside
  modified_base 16: mod_base = OTHER; note = 2'-fluoro modified nucleoside
  modified_base 17: mod_base = OTHER; note = 2'-O-methyl modified nucleoside
  modified_base 18: mod_base = OTHER; note = 2'-fluoro modified nucleoside
  modified_base 19: mod_base = OTHER; note = 2'-O-methyl modified nucleoside with phosphorothioate linkage
  modified_base 20: mod_base = OTHER; note = 2'-O-methyl modified nucleoside with phosphorothioate linkage
  modified_base 21: mod_base = OTHER; note = 2'-O-methyl modified nucleoside
ttgagttcacctttgtagatt

SEQ ID NO: 3140 - RNA, 21 nt, synthetic construct
  source 1..21: mol_type = other RNA
  modified_base 1: mod_base = OTHER; note = 2'-O-methyl modified nucleoside with phosphorothioate linkage
  modified_base 2: mod_base = OTHER; note = 2'-fluoro modified nucleoside with phosphorothioate linkage
  modified_base 3: mod_base = OTHER; note = 2'-O-methyl modified nucleoside
  modified_base 4: mod_base = OTHER; note = 2'-fluoro modified nucleoside
  modified_base 5: mod_base = OTHER; note = 2'-O-methyl modified nucleoside
  modified_base 6: mod_base = OTHER; note = 2'-fluoro modified nucleoside
  modified_base 7: mod_base = OTHER; note = 2'-O-methyl modified nucleoside
  modified_base 8: mod_base = OTHER; note = 2'-fluoro modified nucleoside
  modified_base 9: mod_base = OTHER; note = 2'-O-methyl modified nucleoside
  modified_base 10: mod_base = OTHER; note = 2'-fluoro modified nucleoside
  modified_base 11: mod_base = OTHER; note = 2'-O-methyl modified nucleoside
  modified_base 12: mod_base = OTHER; note = 2'-fluoro modified nucleoside
  modified_base 13: mod_base = OTHER; note = 2'-O-methyl modified nucleoside
  modified_base 14: mod_base = OTHER; note = 2'-fluoro modified nucleoside
  modified_base 15: mod_base = OTHER; note = 2'-O-methyl modified nucleoside
  modified_base 16: mod_base = OTHER; note = 2'-fluoro modified nucleoside
  modified_base 17: mod_base = OTHER; note = 2'-O-methyl modified nucleoside
  modified_base 18: mod_base = OTHER; note = 2'-fluoro modified nucleoside
  modified_base 19: mod_base = OTHER; note = 2'-O-methyl modified nucleoside with phosphorothioate linkage
  modified_base 20: mod_base = OTHER; note = 2'-O-methyl modified nucleoside with phosphorothioate linkage
  modified_base 21: mod_base = OTHER; note = 2'-O-methyl modified nucleoside
ttgagttcacctttgtagatt

SEQ ID NO: 3141 - RNA, 21 nt, synthetic construct
  source 1..21: mol_type = other RNA
  modified_base 1: mod_base = OTHER; note = 2'-O-methyl modified nucleoside with phosphorothioate linkage
  modified_base 2: mod_base = OTHER; note = 2'-fluoro modified nucleoside with phosphorothioate linkage
  modified_base 3: mod_base = OTHER; note = 2'-O-methyl modified nucleoside
  modified_base 4: mod_base = OTHER; note = 2'-O-methyl modified nucleoside
  modified_base 5: mod_base = OTHER; note = 2'-O-methyl modified nucleoside
  modified_base 6: mod_base = OTHER; note = 2'-fluoro modified nucleoside
  modified_base 7: mod_base = OTHER; note = 2'-O-methyl modified nucleoside
  modified_base 8: mod_base = OTHER; note = 2'-fluoro modified nucleoside
  modified_base 9: mod_base = OTHER; note = 2'-O-methyl modified nucleoside
  modified_base 10: mod_base = OTHER; note = 2'-fluoro modified nucleoside
  modified_base 11: mod_base = OTHER; note = 2'-O-methyl modified nucleoside
  modified_base 12: mod_base = OTHER; note = 2'-O-methyl modified nucleoside
  modified_base 13: mod_base = OTHER; note = 2'-O-methyl modified nucleoside
  modified_base 14: mod_base = OTHER; note = 2'-fluoro modified nucleoside
  modified_base 15: mod_base = OTHER; note = 2'-O-methyl modified nucleoside
  modified_base 16: mod_base = OTHER; note = 2'-fluoro modified nucleoside
  modified_base 17: mod_base = OTHER; note = 2'-O-methyl modified nucleoside
  modified_base 18: mod_base = OTHER; note = 2'-fluoro modified nucleoside
  modified_base 19: mod_base = OTHER; note = 2'-O-methyl modified nucleoside with phosphorothioate linkage
  modified_base 20: mod_base = OTHER; note = 2'-O-methyl modified nucleoside with phosphorothioate linkage
  modified_base 21: mod_base = OTHER; note = 2'-O-methyl modified nucleoside
ttgagttcacctttgtagatt

SEQ ID NO: 3142 - RNA, 21 nt, synthetic construct
  source 1..21: mol_type = other RNA
  modified_base 1: mod_base = OTHER; note = 2'-O-methyl modified nucleoside with phosphorothioate linkage
  modified_base 2: mod_base = OTHER; note = 2'-fluoro modified nucleoside with phosphorothioate linkage
  modified_base 3: mod_base = OTHER; note = 2'-O-methyl modified nucleoside
  modified_base 4: mod_base = OTHER; note = 2'-O-methyl modified nucleoside
  modified_base 5: mod_base = OTHER; note = 2'-O-methyl modified nucleoside
  modified_base 6: mod_base = OTHER; note = 2'-fluoro modified nucleoside
  modified_base 7: mod_base = OTHER; note = 2'-O-methyl modified nucleoside
  modified_base 8: mod_base = OTHER; note = 2'-fluoro modified nucleoside
  modified_base 9: mod_base = OTHER; note = 2'-O-methyl modified nucleoside
  modified_base 10: mod_base = OTHER; note = 2'-fluoro modified nucleoside
  modified_base 11: mod_base = OTHER; note = 2'-O-methyl modified nucleoside
  modified_base 12: mod_base = OTHER; note = 2'-fluoro modified nucleoside
  modified_base 13: mod_base = OTHER; note = 2'-O-methyl modified nucleoside
  modified_base 14: mod_base = OTHER; note = 2'-fluoro modified nucleoside
  modified_base 15: mod_base = OTHER; note = 2'-O-methyl modified nucleoside
  modified_base 16: mod_base = OTHER; note = 2'-fluoro modified nucleoside
  modified_base 17: mod_base = OTHER; note = 2'-O-methyl modified nucleoside
  modified_base 18: mod_base = OTHER; note = 2'-fluoro modified nucleoside
  modified_base 19: mod_base = OTHER; note = 2'-O-methyl modified nucleoside with phosphorothioate linkage
  modified_base 20: mod_base = OTHER; note = 2'-O-methyl modified nucleoside with phosphorothioate linkage
  modified_base 21: mod_base = OTHER; note = 2'-O-methyl modified nucleoside
ttgagttcacctttgtagatt

SEQ ID NO: 3143 - RNA, 21 nt, synthetic construct
  source 1..21: mol_type = other RNA
  modified_base 1: mod_base = OTHER; note = 2'-O-methyl modified nucleoside with phosphorothioate linkage
  modified_base 2: mod_base = OTHER; note = 2'-fluoro modified nucleoside with phosphorothioate linkage
  modified_base 3: mod_base = OTHER; note = 2'-O-methyl modified nucleoside
  modified_base 4: mod_base = OTHER; note = 2'-O-methyl modified nucleoside
  modified_base 5: mod_base = OTHER; note = 2'-fluoro modified nucleoside
  modified_base 6: mod_base = OTHER; note = 2'-O-methyl modified nucleoside
  modified_base 7: mod_base = OTHER; note = 2'-fluoro modified nucleoside
  modified_base 8: mod_base = OTHER; note = 2'-O-methyl modified nucleoside
  modified_base 9: mod_base = OTHER; note = 2'-O-methyl modified nucleoside
  modified_base 10: mod_base = OTHER; note = 2'-fluoro modified nucleoside
  modified_base 11: mod_base = OTHER; note = 2'-O-methyl modified nucleoside
  modified_base 12: mod_base = OTHER; note = 2'-fluoro modified nucleoside
  modified_base 13: mod_base = OTHER; note = 2'-O-methyl modified nucleoside
  modified_base 14: mod_base = OTHER; note = 2'-fluoro modified nucleoside
  modified_base 15: mod_base = OTHER; note = 2'-O-methyl modified nucleoside
  modified_base 16: mod_base = OTHER; note = 2'-fluoro modified nucleoside
  modified_base 17: mod_base = OTHER; note = 2'-O-methyl modified nucleoside
  modified_base 18: mod_base = OTHER; note = 2'-fluoro modified nucleoside
  modified_base 19: mod_base = OTHER; note = 2'-O-methyl modified nucleoside with phosphorothioate linkage
  modified_base 20: mod_base = OTHER; note = 2'-O-methyl modified nucleoside with phosphorothioate linkage
  modified_base 21: mod_base = OTHER; note = 2'-O-methyl modified nucleoside
ttgagttcacctttgtagatt

SEQ ID NO: 3144 - RNA, 21 nt, synthetic construct
  source 1..21: mol_type = other RNA
  modified_base 1: mod_base = OTHER; note = 2'-O-methyl modified nucleoside with phosphorothioate linkage
  modified_base 2: mod_base = OTHER; note = 2'-fluoro modified nucleoside with phosphorothioate linkage
  modified_base 3: mod_base = OTHER; note = 2'-O-methyl modified nucleoside
  modified_base 4: mod_base = OTHER; note = 2'-O-methyl modified nucleoside
  modified_base 5: mod_base = OTHER; note = 2'-fluoro modified nucleoside
  modified_base 6: mod_base = OTHER; note = 2'-O-methyl modified nucleoside
  modified_base 7: mod_base = OTHER; note = 2'-fluoro modified nucleoside
  modified_base 8: mod_base = OTHER; note = 2'-O-methyl modified nucleoside
  modified_base 9: mod_base = OTHER; note = 2'-fluoro modified nucleoside
  modified_base 10: mod_base = OTHER; note = 2'-O-methyl modified nucleoside
  modified_base 11: mod_base = OTHER; note = 2'-O-methyl modified nucleoside
  modified_base 12: mod_base = OTHER; note = 2'-O-methyl modified nucleoside
  modified_base 13: mod_base = OTHER; note = 2'-O-methyl modified nucleoside
  modified_base 14: mod_base = OTHER; note = 2'-fluoro modified nucleoside
  modified_base 15: mod_base = OTHER; note = 2'-O-methyl modified nucleoside
  modified_base 16: mod_base = OTHER; note = 2'-fluoro modified nucleoside
  modified_base 17: mod_base = OTHER; note = 2'-O-methyl modified nucleoside
  modified_base 18: mod_base = OTHER; note = 2'-fluoro modified nucleoside
  modified_base 19: mod_base = OTHER; note = 2'-O-methyl modified nucleoside with phosphorothioate linkage
  modified_base 20: mod_base = OTHER; note = 2'-O-methyl modified nucleoside with phosphorothioate linkage
  modified_base 21: mod_base = OTHER; note = 2'-O-methyl modified nucleoside
ttgagttcacctttgtagatt

SEQ ID NO: 3145 - RNA, 21 nt, synthetic construct
  source 1..21: mol_type = other RNA
  modified_base 1: mod_base = OTHER; note = 2'-O-methyl modified nucleoside with phosphorothioate linkage
  modified_base 2: mod_base = OTHER; note = 2'-fluoro modified nucleoside with phosphorothioate linkage
  modified_base 3: mod_base = OTHER; note = 2'-O-methyl modified nucleoside
  modified_base 4: mod_base = OTHER; note = 2'-fluoro modified nucleoside
  modified_base 5: mod_base = OTHER; note = 2'-O-methyl modified nucleoside
  modified_base 6: mod_base = OTHER; note = 2'-O-methyl modified nucleoside
  modified_base 7: mod_base = OTHER; note = 2'-fluoro modified nucleoside
  modified_base 8: mod_base = OTHER; note = 2'-O-methyl modified nucleoside
  modified_base 9: mod_base = OTHER; note = 2'-fluoro modified nucleoside
  modified_base 10: mod_base = OTHER; note = 2'-O-methyl modified nucleoside
  modified_base 11: mod_base = OTHER; note = 2'-O-methyl modified nucleoside
  modified_base 12: mod_base = OTHER; note = 2'-O-methyl modified nucleoside
  modified_base 13: mod_base = OTHER; note = 2'-O-methyl modified nucleoside
  modified_base 14: mod_base = OTHER; note = 2'-fluoro modified nucleoside
  modified_base 15: mod_base = OTHER; note = 2'-O-methyl modified nucleoside
  modified_base 16: mod_base = OTHER; note = 2'-fluoro modified nucleoside
  modified_base 17: mod_base = OTHER; note = 2'-O-methyl modified nucleoside
  modified_base 18: mod_base = OTHER; note = 2'-fluoro modified nucleoside
  modified_base 19: mod_base = OTHER; note = 2'-O-methyl modified nucleoside with phosphorothioate linkage
  modified_base 20: mod_base = OTHER; note = 2'-O-methyl modified nucleoside with phosphorothioate linkage
  modified_base 21: mod_base = OTHER; note = 2'-O-methyl modified nucleoside
ttgagttcacctttgtagatt

SEQ ID NO: 3146 - RNA, 21 nt, synthetic construct
  source 1..21: mol_type = other RNA
  modified_base 1: mod_base = OTHER; note = 2'-O-methyl modified nucleoside with phosphorothioate linkage
  modified_base 2: mod_base = OTHER; note = 2'-fluoro modified nucleoside with phosphorothioate linkage
  modified_base 3: mod_base = OTHER; note = 2'-O-methyl modified nucleoside
  modified_base 4: mod_base = OTHER; note = 2'-fluoro modified nucleoside
  modified_base 5: mod_base = OTHER; note = 2'-O-methyl modified nucleoside
  modified_base 6: mod_base = OTHER; note = 2'-fluoro modified nucleoside
  modified_base 7: mod_base = OTHER; note = 2'-O-methyl modified nucleoside
  modified_base 8: mod_base = OTHER; note = 2'-fluoro modified nucleoside
  modified_base 9: mod_base = OTHER; note = 2'-O-methyl modified nucleoside
  modified_base 10: mod_base = OTHER; note = 2'-fluoro modified nucleoside
  modified_base 11: mod_base = OTHER; note = 2'-O-methyl modified nucleoside
  modified_base 12: mod_base = OTHER; note = 2'-O-methyl modified nucleoside
  modified_base 13: mod_base = OTHER; note = 2'-O-methyl modified nucleoside
  modified_base 14: mod_base = OTHER; note = 2'-fluoro modified nucleoside
  modified_base 15: mod_base = OTHER; note = 2'-O-methyl modified nucleoside
  modified_base 16: mod_base = OTHER; note = 2'-fluoro modified nucleoside
  modified_base 17: mod_base = OTHER; note = 2'-O-methyl modified nucleoside
  modified_base 18: mod_base = OTHER; note = 2'-fluoro modified nucleoside
  modified_base 19: mod_base = OTHER; note = 2'-O-methyl modified nucleoside with phosphorothioate linkage
  modified_base 20: mod_base = OTHER; note = 2'-O-methyl modified nucleoside with phosphorothioate linkage
  modified_base 21: mod_base = OTHER; note = 2'-O-methyl modified nucleoside
ttgagttcacctttgtagatt

SEQ ID NO: 3147 - RNA, 21 nt, synthetic construct
  source 1..21: mol_type = other RNA
  modified_base 1: mod_base = OTHER; note = 2'-O-methyl modified nucleoside with phosphorothioate linkage
  modified_base 2: mod_base = OTHER; note = 2'-fluoro modified nucleoside with phosphorothioate linkage
  modified_base 3: mod_base = OTHER; note = 2'-O-methyl modified nucleoside
  modified_base 4: mod_base = OTHER; note = 2'-fluoro modified nucleoside
  modified_base 5: mod_base = OTHER; note = 2'-O-methyl modified nucleoside
  modified_base 6: mod_base = OTHER; note = 2'-fluoro modified nucleoside
  modified_base 7: mod_base = OTHER; note = 2'-O-methyl modified nucleoside
  modified_base 8: mod_base = OTHER; note = 2'-fluoro modified nucleoside
  modified_base 9: mod_base = OTHER; note = 2'-O-methyl modified nucleoside
  modified_base 10: mod_base = OTHER; note = 2'-fluoro modified nucleoside
  modified_base 11: mod_base = OTHER; note = 2'-O-methyl modified nucleoside
  modified_base 12: mod_base = OTHER; note = 2'-fluoro modified nucleoside
  modified_base 13: mod_base = OTHER; note = 2'-O-methyl modified nucleoside
  modified_base 14: mod_base = OTHER; note = 2'-fluoro modified nucleoside
  modified_base 15: mod_base = OTHER; note = 2'-O-methyl modified nucleoside
  modified_base 16: mod_base = OTHER; note = 2'-fluoro modified nucleoside
  modified_base 17: mod_base = OTHER; note = 2'-O-methyl modified nucleoside
  modified_base 18: mod_base = OTHER; note = 2'-fluoro modified nucleoside
  modified_base 19: mod_base = OTHER; note = 2'-O-methyl modified nucleoside with phosphorothioate linkage
  modified_base 20: mod_base = OTHER; note = 2'-O-methyl modified nucleoside with phosphorothioate linkage
  modified_base 21: mod_base = OTHER; note = 2'-O-methyl modified nucleoside
taccgttctgcttttcttctt

SEQ ID NO: 3148 - RNA, 21 nt, synthetic construct
  source 1..21: mol_type = other RNA
  modified_base 1: mod_base = OTHER; note = 2'-O-methyl modified nucleoside with phosphorothioate linkage
  modified_base 2: mod_base = OTHER; note = 2'-fluoro modified nucleoside with phosphorothioate linkage
  modified_base 3: mod_base = OTHER; note = 2'-O-methyl modified nucleoside
  modified_base 4: mod_base = OTHER; note = 2'-fluoro modified nucleoside
  modified_base 5: mod_base = OTHER; note = 2'-O-methyl modified nucleoside
  modified_base 6: mod_base = OTHER; note = 2'-fluoro modified nucleoside
  modified_base 7: mod_base = OTHER; note = 2'-O-methyl modified nucleoside
  modified_base 8: mod_base = OTHER; note = 2'-fluoro modified nucleoside
  modified_base 9: mod_base = OTHER; note = 2'-O-methyl modified nucleoside
  modified_base 10: mod_base = OTHER; note = 2'-fluoro modified nucleoside
  modified_base 11: mod_base = OTHER; note = 2'-O-methyl modified nucleoside
  modified_base 12: mod_base = OTHER; note = 2'-fluoro modified nucleoside
  modified_base 13: mod_base = OTHER; note = 2'-O-methyl modified nucleoside
  modified_base 14: mod_base = OTHER; note = 2'-fluoro modified nucleoside
  modified_base 15: mod_base = OTHER; note = 2'-O-methyl modified nucleoside
  modified_base 16: mod_base = OTHER; note = 2'-fluoro modified nucleoside
  modified_base 17: mod_base = OTHER; note = 2'-O-methyl modified nucleoside
  modified_base 18: mod_base = OTHER; note = 2'-fluoro modified nucleoside
  modified_base 19: mod_base = OTHER; note = 2'-O-methyl modified nucleoside with phosphorothioate linkage
  modified_base 20: mod_base = OTHER; note = 2'-O-methyl modified nucleoside with phosphorothioate linkage
  modified_base 21: mod_base = OTHER; note = 2'-O-methyl modified nucleoside
taccgttctgcttttcttctt

SEQ ID NO: 3149 - RNA, 21 nt, synthetic construct
  source 1..21: mol_type = other RNA
  modified_base 1: mod_base = OTHER; note = 2'-O-methyl modified nucleoside with phosphorothioate linkage
  modified_base 2: mod_base = OTHER; note = 2'-fluoro modified nucleoside with phosphorothioate linkage
  modified_base 3: mod_base = OTHER; note = 2'-O-methyl modified nucleoside
  modified_base 4: mod_base = OTHER; note = 2'-fluoro modified nucleoside
  modified_base 5: mod_base = OTHER; note = 2'-O-methyl modified nucleoside
  modified_base 6: mod_base = OTHER; note = 2'-fluoro modified nucleoside
  modified_base 7: mod_base = OTHER; note = 2'-O-methyl modified nucleoside
  modified_base 8: mod_base = OTHER; note = 2'-fluoro modified nucleoside
  modified_base 9: mod_base = OTHER; note = 2'-O-methyl modified nucleoside
  modified_base 10: mod_base = OTHER; note = 2'-fluoro modified nucleoside
  modified_base 11: mod_base = OTHER; note = 2'-O-methyl modified nucleoside
  modified_base 12: mod_base = OTHER; note = 2'-fluoro modified nucleoside
  modified_base 13: mod_base = OTHER; note = 2'-O-methyl modified nucleoside
  modified_base 14: mod_base = OTHER; note = 2'-fluoro modified nucleoside
  modified_base 15: mod_base = OTHER; note = 2'-O-methyl modified nucleoside
  modified_base 16: mod_base = OTHER; note = 2'-fluoro modified nucleoside
  modified_base 17: mod_base = OTHER; note = 2'-O-methyl modified nucleoside
  modified_base 18: mod_base = OTHER; note = 2'-fluoro modified nucleoside
  modified_base 19: mod_base = OTHER; note = 2'-O-methyl modified nucleoside with phosphorothioate linkage
  modified_base 20: mod_base = OTHER; note = 2'-O-methyl modified nucleoside with phosphorothioate linkage
  modified_base 21: mod_base = OTHER; note = 2'-O-methyl modified nucleoside
taccgttctgcttttcttctt

SEQ ID NO: 3150 - RNA, 21 nt, synthetic construct
  source 1..21: mol_type = other RNA
  modified_base 1: mod_base = OTHER; note = 2'-O-methyl modified nucleoside with phosphorothioate linkage
  modified_base 2: mod_base = OTHER; note = 2'-fluoro modified nucleoside with phosphorothioate linkage
  modified_base 3: mod_base = OTHER; note = 2'-O-methyl modified nucleoside
  modified_base 4: mod_base = OTHER; note = 2'-O-methyl modified nucleoside
  modified_base 5: mod_base = OTHER; note = 2'-O-methyl modified nucleoside
  modified_base 6: mod_base = OTHER; note = 2'-fluoro modified nucleoside
  modified_base 7: mod_base = OTHER; note = 2'-O-methyl modified nucleoside
  modified_base 8: mod_base = OTHER; note = 2'-fluoro modified nucleoside
  modified_base 9: mod_base = OTHER; note = 2'-O-methyl modified nucleoside
  modified_base 10: mod_base = OTHER; note = 2'-fluoro modified nucleoside
  modified_base 11: mod_base = OTHER; note = 2'-O-methyl modified nucleoside
  modified_base 12: mod_base = OTHER; note = 2'-fluoro modified nucleoside
  modified_base 13: mod_base = OTHER; note = 2'-O-methyl modified nucleoside
  modified_base 14: mod_base = OTHER; note = 2'-fluoro modified nucleoside
  modified_base 15: mod_base = OTHER; note = 2'-O-methyl modified nucleoside
  modified_base 16: mod_base = OTHER; note = 2'-fluoro modified nucleoside
  modified_base 17: mod_base = OTHER; note = 2'-O-methyl modified nucleoside
  modified_base 18: mod_base = OTHER; note = 2'-fluoro modified nucleoside
  modified_base 19: mod_base = OTHER; note = 2'-O-methyl modified nucleoside with phosphorothioate linkage
  modified_base 20: mod_base = OTHER; note = 2'-O-methyl modified nucleoside with phosphorothioate linkage
  modified_base 21: mod_base = OTHER; note = 2'-O-methyl modified nucleoside
taccgttctgcttttcttctt

SEQ ID NO: 3151 - RNA, 21 nt, synthetic construct
  source 1..21: mol_type = other RNA
  modified_base 1: mod_base = OTHER; note = 2'-O-methyl modified nucleoside with phosphorothioate linkage
  modified_base 2: mod_base = OTHER; note = 2'-fluoro modified nucleoside with phosphorothioate linkage
  modified_base 3: mod_base = OTHER; note = 2'-O-methyl modified nucleoside
  modified_base 4: mod_base = OTHER; note = 2'-O-methyl modified nucleoside
  modified_base 5: mod_base = OTHER; note = 2'-O-methyl modified nucleoside
  modified_base 6: mod_base = OTHER; note = 2'-fluoro modified nucleoside
  modified_base 7: mod_base = OTHER; note = 2'-O-methyl modified nucleoside
  modified_base 8: mod_base = OTHER; note = 2'-fluoro modified nucleoside
  modified_base 9: mod_base = OTHER; note = 2'-O-methyl modified nucleoside
  modified_base 10: mod_base = OTHER; note = 2'-fluoro modified nucleoside
  modified_base 11: mod_base = OTHER; note = 2'-O-methyl modified nucleoside
  modified_base 12: mod_base = OTHER; note = 2'-O-methyl modified nucleoside
  modified_base 13: mod_base = OTHER; note = 2'-O-methyl modified nucleoside
  modified_base 14: mod_base = OTHER; note = 2'-fluoro modified nucleoside
  modified_base 15: mod_base = OTHER; note = 2'-O-methyl modified nucleoside
  modified_base 16: mod_base = OTHER; note = 2'-fluoro modified nucleoside
  modified_base 17: mod_base = OTHER; note = 2'-O-methyl modified nucleoside
  modified_base 18: mod_base = OTHER; note = 2'-fluoro modified nucleoside
  modified_base 19: mod_base = OTHER; note = 2'-O-methyl modified nucleoside with phosphorothioate linkage
  modified_base 20: mod_base = OTHER; note = 2'-O-methyl modified nucleoside with phosphorothioate linkage
  modified_base 21: mod_base = OTHER; note = 2'-O-methyl modified nucleoside
taccgttctgcttttcttctt

SEQ ID NO: 3152 - RNA, 21 nt, synthetic construct
  source 1..21: mol_type = other RNA
  modified_base 1: mod_base = OTHER; note = 2'-O-methyl modified nucleoside with phosphorothioate linkage
  modified_base 2: mod_base = OTHER; note = 2'-fluoro modified nucleoside with phosphorothioate linkage
  modified_base 3: mod_base = OTHER; note = 2'-O-methyl modified nucleoside
  modified_base 4: mod_base = OTHER; note = 2'-O-methyl modified nucleoside
  modified_base 5: mod_base = OTHER; note = 2'-O-methyl modified nucleoside
  modified_base 6: mod_base = OTHER; note = 2'-fluoro modified nucleoside
  modified_base 7: mod_base = OTHER; note = 2'-O-methyl modified nucleoside
  modified_base 8: mod_base = OTHER; note = 2'-fluoro modified nucleoside
  modified_base 9: mod_base = OTHER; note = 2'-O-methyl modified nucleoside
  modified_base 10: mod_base = OTHER; note = 2'-O-methyl modified nucleoside
  modified_base 11: mod_base = OTHER; note = 2'-O-methyl modified nucleoside
  modified_base 12: mod_base = OTHER; note = 2'-fluoro modified nucleoside
  modified_base 13: mod_base = OTHER; note = 2'-O-methyl modified nucleoside
  modified_base 14: mod_base = OTHER; note = 2'-fluoro modified nucleoside
  modified_base 15: mod_base = OTHER; note = 2'-O-methyl modified nucleoside
  modified_base 16: mod_base = OTHER; note = 2'-fluoro modified nucleoside
  modified_base 17: mod_base = OTHER; note = 2'-O-methyl modified nucleoside
  modified_base 18: mod_base = OTHER; note = 2'-fluoro modified nucleoside
  modified_base 19: mod_base = OTHER; note = 2'-O-methyl modified nucleoside with phosphorothioate linkage
  modified_base 20: mod_base = OTHER; note = 2'-O-methyl modified nucleoside with phosphorothioate linkage
  modified_base 21: mod_base = OTHER; note = 2'-O-methyl modified nucleoside
taccgttctgcttttcttctt

SEQ ID NO: 3153 - RNA, 21 nt, synthetic construct
  source 1..21: mol_type = other RNA
  modified_base 1: mod_base = OTHER; note = 2'-O-methyl modified nucleoside with phosphorothioate linkage
  modified_base 2: mod_base = OTHER; note = 2'-fluoro modified nucleoside with phosphorothioate linkage
  modified_base 3: mod_base = OTHER; note = 2'-O-methyl modified nucleoside
  modified_base 4: mod_base = OTHER; note = 2'-O-methyl modified nucleoside
  modified_base 5: mod_base = OTHER; note = 2'-fluoro modified nucleoside
  modified_base 6: mod_base = OTHER; note = 2'-O-methyl modified nucleoside
  modified_base 7: mod_base = OTHER; note = 2'-fluoro modified nucleoside
  modified_base 8: mod_base = OTHER; note = 2'-O-methyl modified nucleoside
  modified_base 9: mod_base = OTHER; note = 2'-O-methyl modified nucleoside
  modified_base 10: mod_base = OTHER; note = 2'-fluoro modified nucleoside
  modified_base 11: mod_base = OTHER; note = 2'-O-methyl modified nucleoside
  modified_base 12: mod_base = OTHER; note = 2'-fluoro modified nucleoside
  modified_base 13: mod_base = OTHER; note = 2'-O-methyl modified nucleoside
  modified_base 14: mod_base = OTHER; note = 2'-fluoro modified nucleoside
  modified_base 15: mod_base = OTHER; note = 2'-O-methyl modified nucleoside
  modified_base 16: mod_base = OTHER; note = 2'-fluoro modified nucleoside
  modified_base 17: mod_base = OTHER; note = 2'-O-methyl modified nucleoside
  modified_base 18: mod_base = OTHER; note = 2'-fluoro modified nucleoside
  modified_base 19: mod_base = OTHER; note = 2'-O-methyl modified nucleoside with phosphorothioate linkage
  modified_base 20: mod_base = OTHER; note = 2'-O-methyl modified nucleoside with phosphorothioate linkage
  modified_base 21: mod_base = OTHER; note = 2'-O-methyl modified nucleoside
taccgttctgcttttcttctt

SEQ ID NO: 3154 - RNA, 21 nt, synthetic construct
  source 1..21: mol_type = other RNA
  modified_base 1: mod_base = OTHER; note = 2'-O-methyl modified nucleoside with phosphorothioate linkage
  modified_base 2: mod_base = OTHER; note = 2'-fluoro modified nucleoside with phosphorothioate linkage
  modified_base 3: mod_base = OTHER; note = 2'-O-methyl modified nucleoside
  modified_base 4: mod_base = OTHER; note = 2'-fluoro modified nucleoside
  modified_base 5: mod_base = OTHER; note = 2'-O-methyl modified nucleoside
  modified_base 6: mod_base = OTHER; note = 2'-O-methyl modified nucleoside
  modified_base 7: mod_base = OTHER; note = 2'-fluoro modified nucleoside
  modified_base 8: mod_base = OTHER; note = 2'-O-methyl modified nucleoside
  modified_base 9: mod_base = OTHER; note = 2'-O-methyl modified nucleoside
  modified_base 10: mod_base = OTHER; note = 2'-fluoro modified nucleoside
  modified_base 11: mod_base = OTHER; note = 2'-O-methyl modified nucleoside
  modified_base 12: mod_base = OTHER; note = 2'-fluoro modified nucleoside
  modified_base 13: mod_base = OTHER; note = 2'-O-methyl modified nucleoside
  modified_base 14: mod_base = OTHER; note = 2'-fluoro modified nucleoside
  modified_base 15: mod_base = OTHER; note = 2'-O-methyl modified nucleoside
  modified_base 16: mod_base = OTHER; note = 2'-fluoro modified nucleoside
  modified_base 17: mod_base = OTHER; note = 2'-O-methyl modified nucleoside
  modified_base 18: mod_base = OTHER; note = 2'-fluoro modified nucleoside
  modified_base 19: mod_base = OTHER; note = 2'-O-methyl modified nucleoside with phosphorothioate linkage
  modified_base 20: mod_base = OTHER; note = 2'-O-methyl modified nucleoside with phosphorothioate linkage
  modified_base 21: mod_base = OTHER; note = 2'-O-methyl modified nucleoside
taccgttctgcttttcttctt

SEQ ID NO: 3155 - RNA, 21 nt, synthetic construct
  source 1..21: mol_type = other RNA
  modified_base 1: mod_base = OTHER; note = 2'-O-methyl modified nucleoside with phosphorothioate linkage
  modified_base 2: mod_base = OTHER; note = 2'-fluoro modified nucleoside with phosphorothioate linkage
  modified_base 3: mod_base = OTHER; note = 2'-O-methyl modified nucleoside
  modified_base 4: mod_base = OTHER; note = 2'-fluoro modified nucleoside
  modified_base 5: mod_base = OTHER; note = 2'-O-methyl modified nucleoside
  modified_base 6: mod_base = OTHER; note = 2'-O-methyl modified nucleoside
  modified_base 7: mod_base = OTHER; note = 2'-fluoro modified nucleoside
  modified_base 8: mod_base = OTHER; note = 2'-O-methyl modified nucleoside
  modified_base 9: mod_base = OTHER; note = 2'-O-methyl modified nucleoside
  modified_base 10: mod_base = OTHER; note = 2'-fluoro modified nucleoside
  modified_base 11: mod_base = OTHER; note = 2'-O-methyl modified nucleoside
  modified_base 12: mod_base = OTHER; note = 2'-O-methyl modified nucleoside
  modified_base 13: mod_base = OTHER; note = 2'-O-methyl modified nucleoside
  modified_base 14: mod_base = OTHER; note = 2'-fluoro modified nucleoside
  modified_base 15: mod_base = OTHER; note = 2'-O-methyl modified nucleoside
  modified_base 16: mod_base = OTHER; note = 2'-fluoro modified nucleoside
  modified_base 17: mod_base = OTHER; note = 2'-O-methyl modified nucleoside
  modified_base 18: mod_base = OTHER; note = 2'-fluoro modified nucleoside
  modified_base 19: mod_base = OTHER; note = 2'-O-methyl modified nucleoside with phosphorothioate linkage
  modified_base 20: mod_base = OTHER; note = 2'-O-methyl modified nucleoside with phosphorothioate linkage
  modified_base 21: mod_base = OTHER; note = 2'-O-methyl modified nucleoside
taccgttctgcttttcttctt

SEQ ID NO: 3156 - RNA, 21 nt, synthetic construct
  source 1..21: mol_type = other RNA
  modified_base 1: mod_base = OTHER; note = 2'-O-methyl modified nucleoside with phosphorothioate linkage
  modified_base 2: mod_base = OTHER; note = 2'-fluoro modified nucleoside with phosphorothioate linkage
  modified_base 3: mod_base = OTHER; note = 2'-O-methyl modified nucleoside
  modified_base 4: mod_base = OTHER; note = 2'-fluoro modified nucleoside
  modified_base 5: mod_base = OTHER; note = 2'-O-methyl modified nucleoside
  modified_base 6: mod_base = OTHER; note = 2'-fluoro modified nucleoside
  modified_base 7: mod_base = OTHER; note = 2'-O-methyl modified nucleoside
  modified_base 8: mod_base = OTHER; note = 2'-fluoro modified nucleoside
  modified_base 9: mod_base = OTHER; note = 2'-O-methyl modified nucleoside
  modified_base 10: mod_base = OTHER; note = 2'-fluoro modified nucleoside
  modified_base 11: mod_base = OTHER; note = 2'-O-methyl modified nucleoside
  modified_base 12: mod_base = OTHER; note = 2'-fluoro modified nucleoside
  modified_base 13: mod_base = OTHER; note = 2'-O-methyl modified nucleoside
  modified_base 14: mod_base = OTHER; note = 2'-fluoro modified nucleoside
  modified_base 15: mod_base = OTHER; note = 2'-O-methyl modified nucleoside
  modified_base 16: mod_base = OTHER; note = 2'-fluoro modified nucleoside
  modified_base 17: mod_base = OTHER; note = 2'-O-methyl modified nucleoside
  modified_base 18: mod_base = OTHER; note = 2'-fluoro modified nucleoside
  modified_base 19: mod_base = OTHER; note = 2'-O-methyl modified nucleoside with phosphorothioate linkage
  modified_base 20: mod_base = OTHER; note = 2'-O-methyl modified nucleoside with phosphorothioate linkage
  modified_base 21: mod_base = OTHER; note = 2'-O-methyl modified nucleoside
tcaagtatcgattccaggatt

SEQ ID NO: 3157 - RNA, 21 nt, synthetic construct
  source 1..21: mol_type = other RNA
  modified_base 1: mod_base = OTHER; note = 2'-O-methyl modified nucleoside with phosphorothioate linkage
  modified_base 2: mod_base = OTHER; note = 2'-fluoro modified nucleoside with phosphorothioate linkage
  modified_base 3: mod_base = OTHER; note = 2'-O-methyl modified nucleoside
  modified_base 4: mod_base = OTHER; note = 2'-fluoro modified nucleoside
  modified_base 5: mod_base = OTHER; note = 2'-O-methyl modified nucleoside
  modified_base 6: mod_base = OTHER; note = 2'-fluoro modified nucleoside
  modified_base 7: mod_base = OTHER; note = 2'-O-methyl modified nucleoside
  modified_base 8: mod_base = OTHER; note = 2'-fluoro modified nucleoside
  modified_base 9: mod_base = OTHER; note = 2'-O-methyl modified nucleoside
  modified_base 10: mod_base = OTHER; note = 2'-fluoro modified nucleoside
  modified_base 11: mod_base = OTHER; note = 2'-O-methyl modified nucleoside
  modified_base 12: mod_base = OTHER; note = 2'-fluoro modified nucleoside
  modified_base 13: mod_base = OTHER; note = 2'-O-methyl modified nucleoside
  modified_base 14: mod_base = OTHER; note = 2'-fluoro modified nucleoside
  modified_base 15: mod_base = OTHER; note = 2'-O-methyl modified nucleoside
  modified_base 16: mod_base = OTHER; note = 2'-fluoro modified nucleoside
  modified_base 17: mod_base = OTHER; note = 2'-O-methyl modified nucleoside
  modified_base 18: mod_base = OTHER; note = 2'-fluoro modified nucleoside
  modified_base 19: mod_base = OTHER; note = 2'-O-methyl modified nucleoside with phosphorothioate linkage
  modified_base 20: mod_base = OTHER; note = 2'-O-methyl modified nucleoside with phosphorothioate linkage
  modified_base 21: mod_base = OTHER; note = 2'-O-methyl modified nucleoside
tcaagtatcgattccaggatt

SEQ ID NO: 3158 - RNA, 21 nt, synthetic construct
  source 1..21: mol_type = other RNA
  modified_base 1: mod_base = OTHER; note = 2'-O-methyl modified nucleoside with phosphorothioate linkage
  modified_base 2: mod_base = OTHER; note = 2'-fluoro modified nucleoside with phosphorothioate linkage
  modified_base 3: mod_base = OTHER; note = 2'-O-methyl modified nucleoside
  modified_base 4: mod_base = OTHER; note = 2'-fluoro modified nucleoside
  modified_base 5: mod_base = OTHER; note = 2'-O-methyl modified nucleoside
  modified_base 6: mod_base = OTHER; note = 2'-fluoro modified nucleoside
  modified_base 7: mod_base = OTHER; note = 2'-O-methyl modified nucleoside
  modified_base 8: mod_base = OTHER; note = 2'-fluoro modified nucleoside
  modified_base 9: mod_base = OTHER; note = 2'-O-methyl modified nucleoside
  modified_base 10: mod_base = OTHER; note = 2'-fluoro modified nucleoside
  modified_base 11: mod_base = OTHER; note = 2'-O-methyl modified nucleoside
  modified_base 12: mod_base = OTHER; note = 2'-fluoro modified nucleoside
  modified_base 13: mod_base = OTHER; note = 2'-O-methyl modified nucleoside
  modified_base 14: mod_base = OTHER; note = 2'-fluoro modified nucleoside
  modified_base 15: mod_base = OTHER; note = 2'-O-methyl modified nucleoside
  modified_base 16: mod_base = OTHER; note = 2'-fluoro modified nucleoside
  modified_base 17: mod_base = OTHER; note = 2'-O-methyl modified nucleoside
  modified_base 18: mod_base = OTHER; note = 2'-fluoro modified nucleoside
  modified_base 19: mod_base = OTHER; note = 2'-O-methyl modified nucleoside with phosphorothioate linkage
  modified_base 20: mod_base = OTHER; note = 2'-O-methyl modified nucleoside with phosphorothioate linkage
  modified_base 21: mod_base = OTHER; note = 2'-O-methyl modified nucleoside
tacaagtatcgattccaggtt

SEQ ID NO: 3159 - RNA, 21 nt, synthetic construct
  source 1..21: mol_type = other RNA
  modified_base 1: mod_base = OTHER; note = 2'-O-methyl modified nucleoside with phosphorothioate linkage
  modified_base 2: mod_base = OTHER; note = 2'-fluoro modified nucleoside with phosphorothioate linkage
  modified_base 3: mod_base = OTHER; note = 2'-O-methyl modified nucleoside
  modified_base 4: mod_base = OTHER; note = 2'-fluoro modified nucleoside
  modified_base 5: mod_base = OTHER; note = 2'-O-methyl modified nucleoside
  modified_base 6: mod_base = OTHER; note = 2'-fluoro modified nucleoside
  modified_base 7: mod_base = OTHER; note = 2'-O-methyl modified nucleoside
  modified_base 8: mod_base = OTHER; note = 2'-fluoro modified nucleoside
  modified_base 9: mod_base = OTHER; note = 2'-O-methyl modified nucleoside
  modified_base 10: mod_base = OTHER; note = 2'-fluoro modified nucleoside
  modified_base 11: mod_base = OTHER; note = 2'-O-methyl modified nucleoside
  modified_base 12: mod_base = OTHER; note = 2'-fluoro modified nucleoside
  modified_base 13: mod_base = OTHER; note = 2'-O-methyl modified nucleoside
  modified_base 14: mod_base = OTHER; note = 2'-fluoro modified nucleoside
  modified_base 15: mod_base = OTHER; note = 2'-O-methyl modified nucleoside
  modified_base 16: mod_base = OTHER; note = 2'-fluoro modified nucleoside
  modified_base 17: mod_base = OTHER; note = 2'-O-methyl modified nucleoside
  modified_base 18: mod_base = OTHER; note = 2'-fluoro modified nucleoside
  modified_base 19: mod_base = OTHER; note = 2'-O-methyl modified nucleoside with phosphorothioate linkage
  modified_base 20: mod_base = OTHER; note = 2'-O-methyl modified nucleoside with phosphorothioate linkage
  modified_base 21: mod_base = OTHER; note = 2'-O-methyl modified nucleoside
tacaagtatcgattccaggtt

SEQ ID NO: 3160 - RNA, 21 nt, synthetic construct
  source 1..21: mol_type = other RNA
  modified_base 1: mod_base = OTHER; note = 2'-O-methyl modified nucleoside with phosphorothioate linkage
  modified_base 2: mod_base = OTHER; note = 2'-fluoro modified nucleoside with phosphorothioate linkage
  modified_base 3: mod_base = OTHER; note = 2'-O-methyl modified nucleoside
  modified_base 4: mod_base = OTHER; note = 2'-fluoro modified nucleoside
  modified_base 5: mod_base = OTHER; note = 2'-O-methyl modified nucleoside
  modified_base 6: mod_base = OTHER; note = 2'-fluoro modified nucleoside
  modified_base 7: mod_base = OTHER; note = 2'-O-methyl modified nucleoside
  modified_base 8: mod_base = OTHER; note = 2'-fluoro modified nucleoside
  modified_base 9: mod_base = OTHER; note = 2'-O-methyl modified nucleoside
  modified_base 10: mod_base = OTHER; note = 2'-fluoro modified nucleoside
  modified_base 11: mod_base = OTHER; note = 2'-O-methyl modified nucleoside
  modified_base 12: mod_base = OTHER; note = 2'-fluoro modified nucleoside
  modified_base 13: mod_base = OTHER; note = 2'-O-methyl modified nucleoside
  modified_base 14: mod_base = OTHER; note = 2'-fluoro modified nucleoside
  modified_base 15: mod_base = OTHER; note = 2'-O-methyl modified nucleoside
  modified_base 16: mod_base = OTHER; note = 2'-fluoro modified nucleoside
  modified_base 17: mod_base = OTHER; note = 2'-O-methyl modified nucleoside
  modified_base 18: mod_base = OTHER; note = 2'-fluoro modified nucleoside
  modified_base 19: mod_base = OTHER; note = 2'-O-methyl modified nucleoside with phosphorothioate linkage
  modified_base 20: mod_base = OTHER; note = 2'-O-methyl modified nucleoside with phosphorothioate linkage
  modified_base 21: mod_base = OTHER; note = 2'-O-methyl modified nucleoside
tcaccgttctgcttttctttt

SEQ ID NO: 3161 - RNA, 21 nt, synthetic construct
  source 1..21: mol_type = other RNA
  modified_base 1: mod_base = OTHER; note = 2'-O-methyl modified nucleoside with phosphorothioate linkage
  modified_base 2: mod_base = OTHER; note = 2'-fluoro modified nucleoside with phosphorothioate linkage
  modified_base 3: mod_base = OTHER; note = 2'-O-methyl modified nucleoside
  modified_base 4: mod_base = OTHER; note = 2'-fluoro modified nucleoside
  modified_base 5: mod_base = OTHER; note = 2'-O-methyl modified nucleoside
  modified_base 6: mod_base = OTHER; note = 2'-fluoro modified nucleoside
  modified_base 7: mod_base = OTHER; note = 2'-O-methyl modified nucleoside
  modified_base 8: mod_base = OTHER; note = 2'-fluoro modified nucleoside
  modified_base 9: mod_base = OTHER; note = 2'-O-methyl modified nucleoside
  modified_base 10: mod_base = OTHER; note = 2'-fluoro modified nucleoside
  modified_base 11: mod_base = OTHER; note = 2'-O-methyl modified nucleoside
  modified_base 12: mod_base = OTHER; note = 2'-fluoro modified nucleoside
  modified_base 13: mod_base = OTHER; note = 2'-O-methyl modified nucleoside
  modified_base 14: mod_base = OTHER; note = 2'-fluoro modified nucleoside
  modified_base 15: mod_base = OTHER; note = 2'-O-methyl modified nucleoside
  modified_base 16: mod_base = OTHER; note = 2'-fluoro modified nucleoside
  modified_base 17: mod_base = OTHER; note = 2'-O-methyl modified nucleoside
  modified_base 18: mod_base = OTHER; note = 2'-fluoro modified nucleoside
  modified_base 19: mod_base = OTHER; note = 2'-O-methyl modified nucleoside with phosphorothioate linkage
  modified_base 20: mod_base = OTHER; note = 2'-O-methyl modified nucleoside with phosphorothioate linkage
  modified_base 21: mod_base = OTHER; note = 2'-O-methyl modified nucleoside
tcaccgttctgcttttctttt

SEQ ID NO: 3162 - RNA, 21 nt, synthetic construct
  source 1..21: mol_type = other RNA
  modified_base 1: mod_base = OTHER; note = 2'-O-methyl modified nucleoside with phosphorothioate linkage
  modified_base 2: mod_base = OTHER; note = 2'-fluoro modified nucleoside with phosphorothioate linkage
  modified_base 3: mod_base = OTHER; note = 2'-O-methyl modified nucleoside
  modified_base 4: mod_base = OTHER; note = 2'-fluoro modified nucleoside
  modified_base 5: mod_base = OTHER; note = 2'-O-methyl modified nucleoside
  modified_base 6: mod_base = OTHER; note = 2'-fluoro modified nucleoside
  modified_base 7: mod_base = OTHER; note = 2'-O-methyl modified nucleoside
  modified_base 8: mod_base = OTHER; note = 2'-fluoro modified nucleoside
  modified_base 9: mod_base = OTHER; note = 2'-O-methyl modified nucleoside
  modified_base 10: mod_base = OTHER; note = 2'-fluoro modified nucleoside
  modified_base 11: mod_base = OTHER; note = 2'-O-methyl modified nucleoside
  modified_base 12: mod_base = OTHER; note = 2'-fluoro modified nucleoside
  modified_base 13: mod_base = OTHER; note = 2'-O-methyl modified nucleoside
  modified_base 14: mod_base = OTHER; note = 2'-fluoro modified nucleoside
  modified_base 15: mod_base = OTHER; note = 2'-O-methyl modified nucleoside
  modified_base 16: mod_base = OTHER; note = 2'-fluoro modified nucleoside
  modified_base 17: mod_base = OTHER; note = 2'-O-methyl modified nucleoside
  modified_base 18: mod_base = OTHER; note = 2'-fluoro modified nucleoside
  modified_base 19: mod_base = OTHER; note = 2'-O-methyl modified nucleoside with phosphorothioate linkage
  modified_base 20: mod_base = OTHER; note = 2'-O-methyl modified nucleoside with phosphorothioate linkage
  modified_base 21: mod_base = OTHER; note = 2'-O-methyl modified nucleoside
tcccactttcaccgttctgtt

SEQ ID NO: 3163 - RNA, 21 nt, synthetic construct
  source 1..21: mol_type = other RNA
  modified_base 1: mod_base = OTHER; note = 2'-O-methyl modified nucleoside with phosphorothioate linkage
  modified_base 2: mod_base = OTHER; note = 2'-fluoro modified nucleoside with phosphorothioate linkage
  modified_base 3: mod_base = OTHER; note = 2'-O-methyl modified nucleoside
  modified_base 4: mod_base = OTHER; note = 2'-fluoro modified nucleoside
  modified_base 5: mod_base = OTHER; note = 2'-O-methyl modified nucleoside
  modified_base 6: mod_base = OTHER; note = 2'-fluoro modified nucleoside
  modified_base 7: mod_base = OTHER; note = 2'-O-methyl modified nucleoside
  modified_base 8: mod_base = OTHER; note = 2'-fluoro modified nucleoside
  modified_base 9: mod_base = OTHER; note = 2'-O-methyl modified nucleoside
  modified_base 10: mod_base = OTHER; note = 2'-fluoro modified nucleoside
  modified_base 11: mod_base = OTHER; note = 2'-O-methyl modified nucleoside
  modified_base 12: mod_base = OTHER; note = 2'-fluoro modified nucleoside
  modified_base 13: mod_base = OTHER; note = 2'-O-methyl modified nucleoside
  modified_base 14: mod_base = OTHER; note = 2'-fluoro modified nucleoside
  modified_base 15: mod_base = OTHER; note = 2'-O-methyl modified nucleoside
  modified_base 16: mod_base = OTHER; note = 2'-fluoro modified nucleoside
  modified_base 17: mod_base = OTHER; note = 2'-O-methyl modified nucleoside
  modified_base 18: mod_base = OTHER; note = 2'-fluoro modified nucleoside
  modified_base 19: mod_base = OTHER; note = 2'-O-methyl modified nucleoside with phosphorothioate linkage
  modified_base 20: mod_base = OTHER; note = 2'-O-methyl modified nucleoside with phosphorothioate linkage
  modified_base 21: mod_base = OTHER; note = 2'-O-methyl modified nucleoside
tcccactttcaccgttctgtt

SEQ ID NO: 3164 - RNA, 21 nt, synthetic construct
  source 1..21: mol_type = other RNA
  modified_base 1: mod_base = OTHER; note = 2'-O-methyl modified nucleoside with phosphorothioate linkage
  modified_base 2: mod_base = OTHER; note = 2'-fluoro modified nucleoside with phosphorothioate linkage
  modified_base 3: mod_base = OTHER; note = 2'-O-methyl modified nucleoside
  modified_base 4: mod_base = OTHER; note = 2'-O-methyl modified nucleoside
  modified_base 5: mod_base = OTHER; note = 2'-O-methyl modified nucleoside
  modified_base 6: mod_base = OTHER; note = 2'-fluoro modified nucleoside
  modified_base 7: mod_base = OTHER; note = 2'-O-methyl modified nucleoside
  modified_base 8: mod_base = OTHER; note = 2'-fluoro modified nucleoside
  modified_base 9: mod_base = OTHER; note = 2'-O-methyl modified nucleoside
  modified_base 10: mod_base = OTHER; note = 2'-fluoro modified nucleoside
  modified_base 11: mod_base = OTHER; note = 2'-O-methyl modified nucleoside
  modified_base 12: mod_base = OTHER; note = 2'-fluoro modified nucleoside
  modified_base 13: mod_base = OTHER; note = 2'-O-methyl modified nucleoside
  modified_base 14: mod_base = OTHER; note = 2'-fluoro modified nucleoside
  modified_base 15: mod_base = OTHER; note = 2'-O-methyl modified nucleoside
  modified_base 16: mod_base = OTHER; note = 2'-fluoro modified nucleoside
  modified_base 17: mod_base = OTHER; note = 2'-O-methyl modified nucleoside
  modified_base 18: mod_base = OTHER; note = 2'-fluoro modified nucleoside
  modified_base 19: mod_base = OTHER; note = 2'-O-methyl modified nucleoside with phosphorothioate linkage
  modified_base 20: mod_base = OTHER; note = 2'-O-methyl modified nucleoside with phosphorothioate linkage
  modified_base 21: mod_base = OTHER; note = 2'-O-methyl modified nucleoside
ttgagttcacctttgtagatt

SEQ ID NO: 3165 - RNA, 21 nt, synthetic construct
  source 1..21: mol_type = other RNA
  modified_base 1: mod_base = OTHER; note = 2'-O-methyl modified nucleoside with phosphorothioate linkage
  modified_base 2: mod_base = OTHER; note = 2'-fluoro modified nucleoside with phosphorothioate linkage
  modified_base 3: mod_base = OTHER; note = 2'-O-methyl modified nucleoside
  modified_base 4: mod_base = OTHER; note = 2'-O-methyl modified nucleoside
  modified_base 5: mod_base = OTHER; note = 2'-O-methyl modified nucleoside
  modified_base 6: mod_base = OTHER; note = 2'-fluoro modified nucleoside
  modified_base 7: mod_base = OTHER; note = 2'-O-methyl modified nucleoside
  modified_base 8: mod_base = OTHER; note = 2'-fluoro modified nucleoside
  modified_base 9: mod_base = OTHER; note = 2'-O-methyl modified nucleoside
  modified_base 10: mod_base = OTHER; note = 2'-fluoro modified nucleoside
  modified_base 11: mod_base = OTHER; note = 2'-O-methyl modified nucleoside
  modified_base 12: mod_base = OTHER; note = 2'-fluoro modified nucleoside
  modified_base 13: mod_base = OTHER; note = 2'-O-methyl modified nucleoside
  modified_base 14: mod_base = OTHER; note = 2'-fluoro modified nucleoside
  modified_base 15: mod_base = OTHER; note = 2'-O-methyl modified nucleoside
  modified_base 16: mod_base = OTHER; note = 2'-fluoro modified nucleoside
  modified_base 17: mod_base = OTHER; note = 2'-O-methyl modified nucleoside
  modified_base 18: mod_base = OTHER; note = 2'-fluoro modified nucleoside
  modified_base 19: mod_base = OTHER; note = 2'-O-methyl modified nucleoside with phosphorothioate linkage
  modified_base 20: mod_base = OTHER; note = 2'-O-methyl modified nucleoside with phosphorothioate linkage
  modified_base 21: mod_base = OTHER; note = 2'-O-methyl modified nucleoside
taccgttctgcttttcttctt

SEQ ID NO: 3166 - RNA, 21 nt, synthetic construct
  source 1..21: mol_type = other RNA
  modified_base 1: mod_base = OTHER; note = 2'-O-methyl modified nucleoside with phosphorothioate linkage
  modified_base 2: mod_base = OTHER; note = 2'-fluoro modified nucleoside with phosphorothioate linkage
  modified_base 3: mod_base = OTHER; note = 2'-O-methyl modified nucleoside
  modified_base 4: mod_base = OTHER; note = 2'-fluoro modified nucleoside
  modified_base 5: mod_base = OTHER; note = 2'-O-methyl modified nucleoside
  modified_base 6: mod_base = OTHER; note = 2'-fluoro modified nucleoside
  modified_base 7: mod_base = OTHER; note = 2'-O-methyl modified nucleoside
  modified_base 8: mod_base = OTHER; note = 2'-fluoro modified nucleoside
  modified_base 9: mod_base = OTHER; note = 2'-O-methyl modified nucleoside
  modified_base 10: mod_base = OTHER; note = 2'-fluoro modified nucleoside
  modified_base 11: mod_base = OTHER; note = 2'-O-methyl modified nucleoside
  modified_base 12: mod_base = OTHER; note = 2'-fluoro modified nucleoside
  modified_base 13: mod_base = OTHER; note = 2'-O-methyl modified nucleoside
  modified_base 14: mod_base = OTHER; note = 2'-fluoro modified nucleoside
  modified_base 15: mod_base = OTHER; note = 2'-O-methyl modified nucleoside
  modified_base 16: mod_base = OTHER; note = 2'-fluoro modified nucleoside
  modified_base 17: mod_base = OTHER; note = 2'-O-methyl modified nucleoside
  modified_base 18: mod_base = OTHER; note = 2'-fluoro modified nucleoside
  modified_base 19: mod_base = OTHER; note = 2'-O-methyl modified nucleoside with phosphorothioate linkage
  modified_base 20: mod_base = OTHER; note = 2'-O-methyl modified nucleoside with phosphorothioate linkage
  modified_base 21: mod_base = OTHER; note = 2'-O-methyl modified nucleoside
taaaaatacaagtatcgattt

SEQ ID NO: 3167 - RNA, 21 nt, synthetic construct
  source 1..21: mol_type = other RNA
  modified_base 1: mod_base = OTHER; note = 2'-O-methyl modified nucleoside with phosphorothioate linkage
  modified_base 2: mod_base = OTHER; note = 2'-fluoro modified nucleoside with phosphorothioate linkage
  modified_base 3: mod_base = OTHER; note = 2'-O-methyl modified nucleoside
  modified_base 4: mod_base = OTHER; note = 2'-fluoro modified nucleoside
  modified_base 5: mod_base = OTHER; note = 2'-O-methyl modified nucleoside
  modified_base 6: mod_base = OTHER; note = 2'-fluoro modified nucleoside
  modified_base 7: mod_base = OTHER; note = 2'-O-methyl modified nucleoside
  modified_base 8: mod_base = OTHER; note = 2'-fluoro modified nucleoside
  modified_base 9: mod_base = OTHER; note = 2'-O-methyl modified nucleoside
  modified_base 10: mod_base = OTHER; note = 2'-fluoro modified nucleoside
  modified_base 11: mod_base = OTHER; note = 2'-O-methyl modified nucleoside
  modified_base 12: mod_base = OTHER; note = 2'-fluoro modified nucleoside
  modified_base 13: mod_base = OTHER; note = 2'-O-methyl modified nucleoside
  modified_base 14: mod_base = OTHER; note = 2'-fluoro modified nucleoside
  modified_base 15: mod_base = OTHER; note = 2'-O-methyl modified nucleoside
  modified_base 16: mod_base = OTHER; note = 2'-fluoro modified nucleoside
  modified_base 17: mod_base = OTHER; note = 2'-O-methyl modified nucleoside
  modified_base 18: mod_base = OTHER; note = 2'-fluoro modified nucleoside
  modified_base 19: mod_base = OTHER; note = 2'-O-methyl modified nucleoside with phosphorothioate linkage
  modified_base 20: mod_base = OTHER; note = 2'-O-methyl modified nucleoside with phosphorothioate linkage
  modified_base 21: mod_base = OTHER; note = 2'-O-methyl modified nucleoside
ttaaaagccctgggagtcttt

SEQ ID NO: 3168 - RNA, 21 nt, synthetic construct
  source 1..21: mol_type = other RNA
  modified_base 1: mod_base = OTHER; note = 2'-O-methyl modified nucleoside with phosphorothioate linkage
  modified_base 2: mod_base = OTHER; note = 2'-fluoro modified nucleoside with phosphorothioate linkage
  modified_base 3: mod_base = OTHER; note = 2'-O-methyl modified nucleoside
  modified_base 4: mod_base = OTHER; note = 2'-fluoro modified nucleoside
  modified_base 5: mod_base = OTHER; note = 2'-O-methyl modified nucleoside
  modified_base 6: mod_base = OTHER; note = 2'-fluoro modified nucleoside
  modified_base 7: mod_base = OTHER; note = 2'-O-methyl modified nucleoside
  modified_base 8: mod_base = OTHER; note = 2'-fluoro modified nucleoside
  modified_base 9: mod_base = OTHER; note = 2'-O-methyl modified nucleoside
  modified_base 10: mod_base = OTHER; note = 2'-fluoro modified nucleoside
  modified_base 11: mod_base = OTHER; note = 2'-O-methyl modified nucleoside
  modified_base 12: mod_base = OTHER; note = 2'-fluoro modified nucleoside
  modified_base 13: mod_base = OTHER; note = 2'-O-methyl modified nucleoside
  modified_base 14: mod_base = OTHER; note = 2'-fluoro modified nucleoside
  modified_base 15: mod_base = OTHER; note = 2'-O-methyl modified nucleoside
  modified_base 16: mod_base = OTHER; note = 2'-fluoro modified nucleoside
  modified_base 17: mod_base = OTHER; note = 2'-O-methyl modified nucleoside
  modified_base 18: mod_base = OTHER; note = 2'-fluoro modified nucleoside
  modified_base 19: mod_base = OTHER; note = 2'-O-methyl modified nucleoside with phosphorothioate linkage
  modified_base 20: mod_base = OTHER; note = 2'-O-methyl modified nucleoside with phosphorothioate linkage
  modified_base 21: mod_base = OTHER; note = 2'-O-methyl modified nucleoside
ttcacctttgtagaaagcatt

SEQ ID NO: 3169 - RNA, 21 nt, synthetic construct
  source 1..21: mol_type = other RNA
  modified_base 1: mod_base = OTHER; note = 2'-O-methyl modified nucleoside with phosphorothioate linkage
  modified_base 2: mod_base = OTHER; note = 2'-fluoro modified nucleoside with phosphorothioate linkage
  modified_base 3: mod_base = OTHER; note = 2'-O-methyl modified nucleoside
  modified_base 4: mod_base = OTHER; note = 2'-fluoro modified nucleoside
  modified_base 5: mod_base = OTHER; note = 2'-O-methyl modified nucleoside
  modified_base 6: mod_base = OTHER; note = 2'-fluoro modified nucleoside
  modified_base 7: mod_base = OTHER; note = 2'-O-methyl modified nucleoside
  modified_base 8: mod_base = OTHER; note = 2'-fluoro modified nucleoside
  modified_base 9: mod_base = OTHER; note = 2'-O-methyl modified nucleoside
  modified_base 10: mod_base = OTHER; note = 2'-fluoro modified nucleoside
  modified_base 11: mod_base = OTHER; note = 2'-O-methyl modified nucleoside
  modified_base 12: mod_base = OTHER; note = 2'-fluoro modified nucleoside
  modified_base 13: mod_base = OTHER; note = 2'-O-methyl modified nucleoside
  modified_base 14: mod_base = OTHER; note = 2'-fluoro modified nucleoside
  modified_base 15: mod_base = OTHER; note = 2'-O-methyl modified nucleoside
  modified_base 16: mod_base = OTHER; note = 2'-fluoro modified nucleoside
  modified_base 17: mod_base = OTHER; note = 2'-O-methyl modified nucleoside
  modified_base 18: mod_base = OTHER; note = 2'-fluoro modified nucleoside
  modified_base 19: mod_base = OTHER; note = 2'-O-methyl modified nucleoside with phosphorothioate linkage
  modified_base 20: mod_base = OTHER; note = 2'-O-methyl modified nucleoside with phosphorothioate linkage
  modified_base 21: mod_base = OTHER; note = 2'-O-methyl modified nucleoside
tcctgagttcacctttgtatt

SEQ ID NO: 3170 - RNA, 21 nt, synthetic construct
  source 1..21: mol_type = other RNA
  modified_base 1: mod_base = OTHER; note = 2'-O-methyl modified nucleoside with phosphorothioate linkage
  modified_base 2: mod_base = OTHER; note = 2'-fluoro modified nucleoside with phosphorothioate linkage
  modified_base 3: mod_base = OTHER; note = 2'-O-methyl modified nucleoside
  modified_base 4: mod_base = OTHER; note = 2'-fluoro modified nucleoside
  modified_base 5: mod_base = OTHER; note = 2'-O-methyl modified nucleoside
  modified_base 6: mod_base = OTHER; note = 2'-fluoro modified nucleoside
  modified_base 7: mod_base = OTHER; note = 2'-O-methyl modified nucleoside
  modified_base 8: mod_base = OTHER; note = 2'-fluoro modified nucleoside
  modified_base 9: mod_base = OTHER; note = 2'-O-methyl modified nucleoside
  modified_base 10: mod_base = OTHER; note = 2'-fluoro modified nucleoside
  modified_base 11: mod_base = OTHER; note = 2'-O-methyl modified nucleoside
  modified_base 12: mod_base = OTHER; note = 2'-fluoro modified nucleoside
  modified_base 13: mod_base = OTHER; note = 2'-O-methyl modified nucleoside
  modified_base 14: mod_base = OTHER; note = 2'-fluoro modified nucleoside
  modified_base 15: mod_base = OTHER; note = 2'-O-methyl modified nucleoside
  modified_base 16: mod_base = OTHER; note = 2'-fluoro modified nucleoside
  modified_base 17: mod_base = OTHER; note = 2'-O-methyl modified nucleoside
  modified_base 18: mod_base = OTHER; note = 2'-fluoro modified nucleoside
  modified_base 19: mod_base = OTHER; note = 2'-O-methyl modified nucleoside with phosphorothioate linkage
  modified_base 20: mod_base = OTHER; note = 2'-O-methyl modified nucleoside with phosphorothioate linkage
  modified_base 21: mod_base = OTHER; note = 2'-O-methyl modified nucleoside
tcactttcaccgttctgcttt

SEQ ID NO: 3171 - RNA, 21 nt, synthetic construct
  source 1..21: mol_type = other RNA
  modified_base 1: mod_base = OTHER; note = 2'-O-methyl modified nucleoside with phosphorothioate linkage
  modified_base 2: mod_base = OTHER; note = 2'-fluoro modified nucleoside with phosphorothioate linkage
  modified_base 3: mod_base = OTHER; note = 2'-O-methyl modified nucleoside
  modified_base 4: mod_base = OTHER; note = 2'-fluoro modified nucleoside
  modified_base 5: mod_base = OTHER; note = 2'-O-methyl modified nucleoside
  modified_base 6: mod_base = OTHER; note = 2'-fluoro modified nucleoside
  modified_base 7: mod_base = OTHER; note = 2'-O-methyl modified nucleoside
  modified_base 8: mod_base = OTHER; note = 2'-fluoro modified nucleoside
  modified_base 9: mod_base = OTHER; note = 2'-O-methyl modified nucleoside
  modified_base 10: mod_base = OTHER; note = 2'-fluoro modified nucleoside
  modified_base 11: mod_base = OTHER; note = 2'-O-methyl modified nucleoside
  modified_base 12: mod_base = OTHER; note = 2'-fluoro modified nucleoside
  modified_base 13: mod_base = OTHER; note = 2'-O-methyl modified nucleoside
  modified_base 14: mod_base = OTHER; note = 2'-fluoro modified nucleoside
  modified_base 15: mod_base = OTHER; note = 2'-O-methyl modified nucleoside
  modified_base 16: mod_base = OTHER; note = 2'-fluoro modified nucleoside
  modified_base 17: mod_base = OTHER; note = 2'-O-methyl modified nucleoside
  modified_base 18: mod_base = OTHER; note = 2'-fluoro modified nucleoside
  modified_base 19: mod_base = OTHER; note = 2'-O-methyl modified nucleoside with phosphorothioate linkage
  modified_base 20: mod_base = OTHER; note = 2'-O-methyl modified nucleoside with phosphorothioate linkage
  modified_base 21: mod_base = OTHER; note = 2'-O-methyl modified nucleoside
taccgttctgcttttcttctt

SEQ ID NO: 3172 - RNA, 21 nt, synthetic construct
  source 1..21: mol_type = other RNA
  modified_base 1: mod_base = OTHER; note = 2'-O-methyl modified nucleoside with phosphorothioate linkage
  modified_base 2: mod_base = OTHER; note = 2'-fluoro modified nucleoside with phosphorothioate linkage
  modified_base 3: mod_base = OTHER; note = 2'-O-methyl modified nucleoside
  modified_base 4: mod_base = OTHER; note = 2'-O-methyl modified nucleoside
  modified_base 5: mod_base = OTHER; note = 2'-O-methyl modified nucleoside
  modified_base 6: mod_base = OTHER; note = 2'-fluoro modified nucleoside
  modified_base 7: mod_base = OTHER; note = 2'-O-methyl modified nucleoside
  modified_base 8: mod_base = OTHER; note = 2'-fluoro modified nucleoside
  modified_base 9: mod_base = OTHER; note = 2'-O-methyl modified nucleoside
  modified_base 10: mod_base = OTHER; note = 2'-fluoro modified nucleoside
  modified_base 11: mod_base = OTHER; note = 2'-O-methyl modified nucleoside
  modified_base 12: mod_base = OTHER; note = 2'-fluoro modified nucleoside
  modified_base 13: mod_base = OTHER; note = 2'-O-methyl modified nucleoside
  modified_base 14: mod_base = OTHER; note = 2'-fluoro modified nucleoside
  modified_base 15: mod_base = OTHER; note = 2'-O-methyl modified nucleoside
  modified_base 16: mod_base = OTHER; note = 2'-fluoro modified nucleoside
  modified_base 17: mod_base = OTHER; note = 2'-O-methyl modified nucleoside
  modified_base 18: mod_base = OTHER; note = 2'-fluoro modified nucleoside
  modified_base 19: mod_base = OTHER; note = 2'-O-methyl modified nucleoside with phosphorothioate linkage
  modified_base 20: mod_base = OTHER; note = 2'-O-methyl modified nucleoside with phosphorothioate linkage
  modified_base 21: mod_base = OTHER; note = 2'-O-methyl modified nucleoside
taccgttctgcttttcttctt

SEQ ID NO: 3173 - skipped

SEQ ID NO: 3174 - RNA, 21 nt, synthetic construct
  source 1..21: mol_type = other RNA
  modified_base 1: mod_base = OTHER; note = 2'-O-methyl modified nucleoside with phosphorothioate linkage
  modified_base 2: mod_base = OTHER; note = 2'-fluoro modified nucleoside with phosphorothioate linkage
  modified_base 3: mod_base = OTHER; note = 2'-O-methyl modified nucleoside
  modified_base 4: mod_base = OTHER; note = 2'-O-methyl modified nucleoside
  modified_base 5: mod_base = OTHER; note = 2'-fluoro modified nucleoside
  modified_base 6: mod_base = OTHER; note = 2'-O-methyl modified nucleoside
  modified_base 7: mod_base = OTHER; note = 2'-fluoro modified nucleoside
  modified_base 8: mod_base = OTHER; note = 2'-O-methyl modified nucleoside
  modified_base 9: mod_base = OTHER; note = 2'-O-methyl modified nucleoside
  modified_base 10: mod_base = OTHER; note = 2'-fluoro modified nucleoside
  modified_base 11: mod_base = OTHER; note = 2'-O-methyl modified nucleoside
  modified_base 12: mod_base = OTHER; note = 2'-fluoro modified nucleoside
  modified_base 13: mod_base = OTHER; note = 2'-O-methyl modified nucleoside
  modified_base 14: mod_base = OTHER; note = 2'-fluoro modified nucleoside
  modified_base 15: mod_base = OTHER; note = 2'-O-methyl modified nucleoside
  modified_base 16: mod_base = OTHER; note = 2'-fluoro modified nucleoside
  modified_base 17: mod_base = OTHER; note = 2'-O-methyl modified nucleoside
  modified_base 18: mod_base = OTHER; note = 2'-fluoro modified nucleoside
  modified_base 19: mod_base = OTHER; note = 2'-O-methyl modified nucleoside with phosphorothioate linkage
  modified_base 20: mod_base = OTHER; note = 2'-O-methyl modified nucleoside with phosphorothioate linkage
  modified_base 21: mod_base = OTHER; note = 2'-O-methyl modified nucleoside
taccgttctgcttttcttctt

SEQ ID NO: 3175 - RNA, 21 nt, synthetic construct
  source 1..21: mol_type = other RNA
  modified_base 1: mod_base = OTHER; note = 2'-O-methyl modified nucleoside with phosphorothioate linkage
  modified_base 2: mod_base = OTHER; note = 2'-fluoro modified nucleoside with phosphorothioate linkage
  modified_base 3: mod_base = OTHER; note = 2'-O-methyl modified nucleoside
  modified_base 4: mod_base = OTHER; note = 2'-fluoro modified nucleoside
  modified_base 5: mod_base = OTHER; note = 2'-O-methyl modified nucleoside
  modified_base 6: mod_base = OTHER; note = 2'-fluoro modified nucleoside
  modified_base 7: mod_base = OTHER; note = 2'-O-methyl modified nucleoside
  modified_base 8: mod_base = OTHER; note = 2'-fluoro modified nucleoside
  modified_base 9: mod_base = OTHER; note = 2'-O-methyl modified nucleoside
  modified_base 10: mod_base = OTHER; note = 2'-fluoro modified nucleoside
  modified_base 11: mod_base = OTHER; note = 2'-O-methyl modified nucleoside
  modified_base 12: mod_base = OTHER; note = 2'-fluoro modified nucleoside
  modified_base 13: mod_base = OTHER; note = 2'-O-methyl modified nucleoside
  modified_base 14: mod_base = OTHER; note = 2'-fluoro modified nucleoside
  modified_base 15: mod_base = OTHER; note = 2'-O-methyl modified nucleoside
  modified_base 16: mod_base = OTHER; note = 2'-fluoro modified nucleoside
  modified_base 17: mod_base = OTHER; note = 2'-O-methyl modified nucleoside
  modified_base 18: mod_base = OTHER; note = 2'-fluoro modified nucleoside
  modified_base 19: mod_base = OTHER; note = 2'-O-methyl modified nucleoside with phosphorothioate linkage
  modified_base 20: mod_base = OTHER; note = 2'-O-methyl modified nucleoside with phosphorothioate linkage
  modified_base 21: mod_base = OTHER; note = 2'-O-methyl modified nucleoside
ttgagttcacctttgtagatt

SEQ ID NO: 3176 - RNA, 21 nt, synthetic construct
  source 1..21: mol_type = other RNA
  modified_base 1: mod_base = OTHER; note = 2'-O-methyl modified nucleoside with phosphorothioate linkage
  modified_base 2: mod_base = OTHER; note = 2'-fluoro modified nucleoside with phosphorothioate linkage
  modified_base 3: mod_base = OTHER; note = 2'-O-methyl modified nucleoside
  modified_base 4: mod_base = OTHER; note = 2'-O-methyl modified nucleoside
  modified_base 5: mod_base = OTHER; note = 2'-O-methyl modified nucleoside
  modified_base 6: mod_base = OTHER; note = 2'-fluoro modified nucleoside
  modified_base 7: mod_base = OTHER; note = 2'-O-methyl modified nucleoside
  modified_base 8: mod_base = OTHER; note = 2'-fluoro modified nucleoside
  modified_base 9: mod_base = OTHER; note = 2'-O-methyl modified nucleoside
  modified_base 10: mod_base = OTHER; note = 2'-fluoro modified nucleoside
  modified_base 11: mod_base = OTHER; note = 2'-O-methyl modified nucleoside
  modified_base 12: mod_base = OTHER; note = 2'-fluoro modified nucleoside
  modified_base 13: mod_base = OTHER; note = 2'-O-methyl modified nucleoside
  modified_base 14: mod_base = OTHER; note = 2'-fluoro modified nucleoside
  modified_base 15: mod_base = OTHER; note = 2'-O-methyl modified nucleoside
  modified_base 16: mod_base = OTHER; note = 2'-fluoro modified nucleoside
  modified_base 17: mod_base = OTHER; note = 2'-O-methyl modified nucleoside
  modified_base 18: mod_base = OTHER; note = 2'-fluoro modified nucleoside
  modified_base 19: mod_base = OTHER; note = 2'-O-methyl modified nucleoside with phosphorothioate linkage
  modified_base 20: mod_base = OTHER; note = 2'-O-methyl modified nucleoside with phosphorothioate linkage
  modified_base 21: mod_base = OTHER; note = 2'-O-methyl modified nucleoside
ttgagttcacctttgtagatt

SEQ ID NO: 3177 - RNA, 21 nt, synthetic construct
  source 1..21: mol_type = other RNA
  modified_base 1: mod_base = OTHER; note = 2'-O-methyl modified nucleoside with phosphorothioate linkage
  modified_base 2: mod_base = OTHER; note = 2'-fluoro modified nucleoside with phosphorothioate linkage
  modified_base 3: mod_base = OTHER; note = 2'-O-methyl modified nucleoside
  modified_base 4: mod_base = OTHER; note = 2'-O-methyl modified nucleoside
  modified_base 5: mod_base = OTHER; note = 2'-fluoro modified nucleoside
  modified_base 6: mod_base = OTHER; note = 2'-O-methyl modified nucleoside
  modified_base 7: mod_base = OTHER; note = 2'-fluoro modified nucleoside
  modified_base 8: mod_base = OTHER; note = 2'-O-methyl modified nucleoside
  modified_base 9: mod_base = OTHER; note = 2'-O-methyl modified nucleoside
  modified_base 10: mod_base = OTHER; note = 2'-fluoro modified nucleoside
  modified_base 11: mod_base = OTHER; note = 2'-O-methyl modified nucleoside
  modified_base 12: mod_base = OTHER; note = 2'-fluoro modified nucleoside
  modified_base 13: mod_base = OTHER; note = 2'-O-methyl modified nucleoside
  modified_base 14: mod_base = OTHER; note = 2'-fluoro modified nucleoside
  modified_base 15: mod_base = OTHER; note = 2'-O-methyl modified nucleoside
  modified_base 16: mod_base = OTHER; note = 2'-fluoro modified nucleoside
  modified_base 17: mod_base = OTHER; note = 2'-O-methyl modified nucleoside
  modified_base 18: mod_base = OTHER; note = 2'-fluoro modified nucleoside
  modified_base 19: mod_base = OTHER; note = 2'-O-methyl modified nucleoside with phosphorothioate linkage
  modified_base 20: mod_base = OTHER; note = 2'-O-methyl modified nucleoside with phosphorothioate linkage
  modified_base 21: mod_base = OTHER; note = 2'-O-methyl modified nucleoside
ttgagttcacctttgtagatt

SEQ ID NO: 3178 - RNA, 21 nt, synthetic construct
  source 1..21: mol_type = other RNA
  modified_base 1: mod_base = OTHER; note = 2'-O-methyl modified nucleoside with phosphorothioate linkage
  modified_base 2: mod_base = OTHER; note = 2'-fluoro modified nucleoside with phosphorothioate linkage
  modified_base 3: mod_base = OTHER; note = 2'-O-methyl modified nucleoside
  modified_base 4: mod_base = OTHER; note = 2'-fluoro modified nucleoside
  modified_base 5: mod_base = OTHER; note = 2'-O-methyl modified nucleoside
  modified_base 6: mod_base = OTHER; note = 2'-O-methyl modified nucleoside
  modified_base 7: mod_base = OTHER; note = 2'-fluoro modified nucleoside
  modified_base 8: mod_base = OTHER; note = 2'-O-methyl modified nucleoside
  modified_base 9: mod_base = OTHER; note = 2'-fluoro modified nucleoside
  modified_base 10: mod_base = OTHER; note = 2'-O-methyl modified nucleoside
  modified_base 11: mod_base = OTHER; note = 2'-O-methyl modified nucleoside
  modified_base 12: mod_base = OTHER; note = 2'-O-methyl modified nucleoside
  modified_base 13: mod_base = OTHER; note = 2'-O-methyl modified nucleoside
  modified_base 14: mod_base = OTHER; note = 2'-fluoro modified nucleoside
  modified_base 15: mod_base = OTHER; note = 2'-O-methyl modified nucleoside
  modified_base 16: mod_base = OTHER; note = 2'-fluoro modified nucleoside
  modified_base 17: mod_base = OTHER; note = 2'-O-methyl modified nucleoside
  modified_base 18: mod_base = OTHER; note = 2'-fluoro modified nucleoside
  modified_base 19: mod_base = OTHER; note = 2'-O-methyl modified nucleoside with phosphorothioate linkage
  modified_base 20: mod_base = OTHER; note = 2'-O-methyl modified nucleoside with phosphorothioate linkage
  modified_base 21: mod_base = OTHER; note = 2'-O-methyl modified nucleoside
ttgagttcacctttgtagatt

SEQ ID NO: 3179 - RNA, 21 nt, synthetic construct
  source 1..21: mol_type = other RNA
  modified_base 1: mod_base = OTHER; note = 2'-O-methyl modified nucleoside with phosphorothioate linkage
  modified_base 2: mod_base = OTHER; note = 2'-fluoro modified nucleoside with phosphorothioate linkage
  modified_base 3: mod_base = OTHER; note = 2'-O-methyl modified nucleoside
  modified_base 4: mod_base = OTHER; note = 2'-fluoro modified nucleoside
  modified_base 5: mod_base = OTHER; note = 2'-O-methyl modified nucleoside
  modified_base 6: mod_base = OTHER; note = 2'-fluoro modified nucleoside
  modified_base 7: mod_base = OTHER; note = 2'-O-methyl modified nucleoside
  modified_base 8: mod_base = OTHER; note = 2'-fluoro modified nucleoside
  modified_base 9: mod_base = OTHER; note = 2'-O-methyl modified nucleoside
  modified_base 10: mod_base = OTHER; note = 2'-fluoro modified nucleoside
  modified_base 11: mod_base = OTHER; note = 2'-O-methyl modified nucleoside
  modified_base 12: mod_base = OTHER; note = 2'-fluoro modified nucleoside
  modified_base 13: mod_base = OTHER; note = 2'-O-methyl modified nucleoside
  modified_base 14: mod_base = OTHER; note = 2'-fluoro modified nucleoside
  modified_base 15: mod_base = OTHER; note = 2'-O-methyl modified nucleoside
  modified_base 16: mod_base = OTHER; note = 2'-fluoro modified nucleoside
  modified_base 17: mod_base = OTHER; note = 2'-O-methyl modified nucleoside
  modified_base 18: mod_base = OTHER; note = 2'-fluoro modified nucleoside
  modified_base 19: mod_base = OTHER; note = 2'-O-methyl modified nucleoside with phosphorothioate linkage
  modified_base 20: mod_base = OTHER; note = 2'-O-methyl modified nucleoside with phosphorothioate linkage
  modified_base 21: mod_base = OTHER; note = 2'-O-methyl modified nucleoside
tgcaatttaacactagccatt

SEQ ID NO: 3180 - RNA, 21 nt, synthetic construct
  source 1..21: mol_type = other RNA
  modified_base 1: mod_base = OTHER; note = 2'-O-methyl modified nucleoside with phosphorothioate linkage
  modified_base 2: mod_base = OTHER; note = 2'-fluoro modified nucleoside with phosphorothioate linkage
  modified_base 3: mod_base = OTHER; note = 2'-O-methyl modified nucleoside
  modified_base 4: mod_base = OTHER; note = 2'-fluoro modified nucleoside
  modified_base 5: mod_base = OTHER; note = 2'-O-methyl modified nucleoside
  modified_base 6: mod_base = OTHER; note = 2'-fluoro modified nucleoside
  modified_base 7: mod_base = OTHER; note = 2'-O-methyl modified nucleoside
  modified_base 8: mod_base = OTHER; note = 2'-fluoro modified nucleoside
  modified_base 9: mod_base = OTHER; note = 2'-O-methyl modified nucleoside
  modified_base 10: mod_base = OTHER; note = 2'-fluoro modified nucleoside
  modified_base 11: mod_base = OTHER; note = 2'-O-methyl modified nucleoside
  modified_base 12: mod_base = OTHER; note = 2'-fluoro modified nucleoside
  modified_base 13: mod_base = OTHER; note = 2'-O-methyl modified nucleoside
  modified_base 14: mod_base = OTHER; note = 2'-fluoro modified nucleoside
  modified_base 15: mod_base = OTHER; note = 2'-O-methyl modified nucleoside
  modified_base 16: mod_base = OTHER; note = 2'-fluoro modified nucleoside
  modified_base 17: mod_base = OTHER; note = 2'-O-methyl modified nucleoside
  modified_base 18: mod_base = OTHER; note = 2'-fluoro modified nucleoside
  modified_base 19: mod_base = OTHER; note = 2'-O-methyl modified nucleoside with phosphorothioate linkage
  modified_base 20: mod_base = OTHER; note = 2'-O-methyl modified nucleoside with phosphorothioate linkage
  modified_base 21: mod_base = OTHER; note = 2'-O-methyl modified nucleoside
tagcaatttaacactagcctt

SEQ ID NO: 3181 - RNA, 21 nt, synthetic construct
  source 1..21: mol_type = other RNA
  modified_base 1: mod_base = OTHER; note = 2'-O-methyl modified nucleoside with phosphorothioate linkage
  modified_base 2: mod_base = OTHER; note = 2'-fluoro modified nucleoside with phosphorothioate linkage
  modified_base 3: mod_base = OTHER; note = 2'-O-methyl modified nucleoside
  modified_base 4: mod_base = OTHER; note = 2'-fluoro modified nucleoside
  modified_base 5: mod_base = OTHER; note = 2'-O-methyl modified nucleoside
  modified_base 6: mod_base = OTHER; note = 2'-fluoro modified nucleoside
  modified_base 7: mod_base = OTHER; note = 2'-O-methyl modified nucleoside
  modified_base 8: mod_base = OTHER; note = 2'-fluoro modified nucleoside
  modified_base 9: mod_base = OTHER; note = 2'-O-methyl modified nucleoside
  modified_base 10: mod_base = OTHER; note = 2'-fluoro modified nucleoside
  modified_base 11: mod_base = OTHER; note = 2'-O-methyl modified nucleoside
  modified_base 12: mod_base = OTHER; note = 2'-fluoro modified nucleoside
  modified_base 13: mod_base = OTHER; note = 2'-O-methyl modified nucleoside
  modified_base 14: mod_base = OTHER; note = 2'-fluoro modified nucleoside
  modified_base 15: mod_base = OTHER; note = 2'-O-methyl modified nucleoside
  modified_base 16: mod_base = OTHER; note = 2'-fluoro modified nucleoside
  modified_base 17: mod_base = OTHER; note = 2'-O-methyl modified nucleoside
  modified_base 18: mod_base = OTHER; note = 2'-fluoro modified nucleoside
  modified_base 19: mod_base = OTHER; note = 2'-O-methyl modified nucleoside with phosphorothioate linkage
  modified_base 20: mod_base = OTHER; note = 2'-O-methyl modified nucleoside with phosphorothioate linkage
  modified_base 21: mod_base = OTHER; note = 2'-O-methyl modified nucleoside
taagcaatttaacactagctt

SEQ ID NO: 3182 - RNA, 21 nt, synthetic construct
  source 1..21: mol_type = other RNA
  modified_base 1: mod_base = OTHER; note = 2'-O-methyl modified nucleoside with phosphorothioate linkage
  modified_base 2: mod_base = OTHER; note = 2'-fluoro modified nucleoside with phosphorothioate linkage
  modified_base 3: mod_base = OTHER; note = 2'-O-methyl modified nucleoside
  modified_base 4: mod_base = OTHER; note = 2'-fluoro modified nucleoside
  modified_base 5: mod_base = OTHER; note = 2'-O-methyl modified nucleoside
  modified_base 6: mod_base = OTHER; note = 2'-fluoro modified nucleoside
  modified_base 7: mod_base = OTHER; note = 2'-O-methyl modified nucleoside
  modified_base 8: mod_base = OTHER; note = 2'-fluoro modified nucleoside
  modified_base 9: mod_base = OTHER; note = 2'-O-methyl modified nucleoside
  modified_base 10: mod_base = OTHER; note = 2'-fluoro modified nucleoside
  modified_base 11: mod_base = OTHER; note = 2'-O-methyl modified nucleoside
  modified_base 12: mod_base = OTHER; note = 2'-fluoro modified nucleoside
  modified_base 13: mod_base = OTHER; note = 2'-O-methyl modified nucleoside
  modified_base 14: mod_base = OTHER; note = 2'-fluoro modified nucleoside
  modified_base 15: mod_base = OTHER; note = 2'-O-methyl modified nucleoside
  modified_base 16: mod_base = OTHER; note = 2'-fluoro modified nucleoside
  modified_base 17: mod_base = OTHER; note = 2'-O-methyl modified nucleoside
  modified_base 18: mod_base = OTHER; note = 2'-fluoro modified nucleoside
  modified_base 19: mod_base = OTHER; note = 2'-O-methyl modified nucleoside with phosphorothioate linkage
  modified_base 20: mod_base = OTHER; note = 2'-O-methyl modified nucleoside with phosphorothioate linkage
  modified_base 21: mod_base = OTHER; note = 2'-O-methyl modified nucleoside
tggctttcttaaaacaccgtt

SEQ ID NO: 3183 - RNA, 21 nt, synthetic construct
  source 1..21: mol_type = other RNA
  modified_base 1: mod_base = OTHER; note = 2'-O-methyl modified nucleoside with phosphorothioate linkage
  modified_base 2: mod_base = OTHER; note = 2'-fluoro modified nucleoside with phosphorothioate linkage
  modified_base 3: mod_base = OTHER; note = 2'-O-methyl modified nucleoside
  modified_base 4: mod_base = OTHER; note = 2'-fluoro modified nucleoside
  modified_base 5: mod_base = OTHER; note = 2'-O-methyl modified nucleoside
  modified_base 6: mod_base = OTHER; note = 2'-fluoro modified nucleoside
  modified_base 7: mod_base = OTHER; note = 2'-O-methyl modified nucleoside
  modified_base 8: mod_base = OTHER; note = 2'-fluoro modified nucleoside
  modified_base 9: mod_base = OTHER; note = 2'-O-methyl modified nucleoside
  modified_base 10: mod_base = OTHER; note = 2'-fluoro modified nucleoside
  modified_base 11: mod_base = OTHER; note = 2'-O-methyl modified nucleoside
  modified_base 12: mod_base = OTHER; note = 2'-fluoro modified nucleoside
  modified_base 13: mod_base = OTHER; note = 2'-O-methyl modified nucleoside
  modified_base 14: mod_base = OTHER; note = 2'-fluoro modified nucleoside
  modified_base 15: mod_base = OTHER; note = 2'-O-methyl modified nucleoside
  modified_base 16: mod_base = OTHER; note = 2'-fluoro modified nucleoside
  modified_base 17: mod_base = OTHER; note = 2'-O-methyl modified nucleoside
  modified_base 18: mod_base = OTHER; note = 2'-fluoro modified nucleoside
  modified_base 19: mod_base = OTHER; note = 2'-O-methyl modified nucleoside with phosphorothioate linkage
  modified_base 20: mod_base = OTHER; note = 2'-O-methyl modified nucleoside with phosphorothioate linkage
  modified_base 21: mod_base = OTHER; note = 2'-O-methyl modified nucleoside
tatcgattccaggaagtactt

SEQ ID NO: 3184 - RNA, 21 nt, synthetic construct
  source 1..21: mol_type = other RNA
  modified_base 1: mod_base = OTHER; note = 2'-O-methyl modified nucleoside with phosphorothioate linkage
  modified_base 2: mod_base = OTHER; note = 2'-fluoro modified nucleoside with phosphorothioate linkage
  modified_base 3: mod_base = OTHER; note = 2'-O-methyl modified nucleoside
  modified_base 4: mod_base = OTHER; note = 2'-fluoro modified nucleoside
  modified_base 5: mod_base = OTHER; note = 2'-O-methyl modified nucleoside
  modified_base 6: mod_base = OTHER; note = 2'-fluoro modified nucleoside
  modified_base 7: mod_base = OTHER; note = 2'-O-methyl modified nucleoside
  modified_base 8: mod_base = OTHER; note = 2'-fluoro modified nucleoside
  modified_base 9: mod_base = OTHER; note = 2'-O-methyl modified nucleoside
  modified_base 10: mod_base = OTHER; note = 2'-fluoro modified nucleoside
  modified_base 11: mod_base = OTHER; note = 2'-O-methyl modified nucleoside
  modified_base 12: mod_base = OTHER; note = 2'-fluoro modified nucleoside
  modified_base 13: mod_base = OTHER; note = 2'-O-methyl modified nucleoside
  modified_base 14: mod_base = OTHER; note = 2'-fluoro modified nucleoside
  modified_base 15: mod_base = OTHER; note = 2'-O-methyl modified nucleoside
  modified_base 16: mod_base = OTHER; note = 2'-fluoro modified nucleoside
  modified_base 17: mod_base = OTHER; note = 2'-O-methyl modified nucleoside
  modified_base 18: mod_base = OTHER; note = 2'-fluoro modified nucleoside
  modified_base 19: mod_base = OTHER; note = 2'-O-methyl modified nucleoside with phosphorothioate linkage
  modified_base 20: mod_base = OTHER; note = 2'-O-methyl modified nucleoside with phosphorothioate linkage
  modified_base 21: mod_base = OTHER; note = 2'-O-methyl modified nucleoside
ttttggtgcacgtaacttgtt

SEQ ID NO: 3185 - RNA, 21 nt, synthetic construct
  source 1..21: mol_type = other RNA
  modified_base 1: mod_base = OTHER; note = 2'-O-methyl modified nucleoside with phosphorothioate linkage
  modified_base 2: mod_base = OTHER; note = 2'-fluoro modified nucleoside with phosphorothioate linkage
  modified_base 3: mod_base = OTHER; note = 2'-O-methyl modified nucleoside
  modified_base 4: mod_base = OTHER; note = 2'-fluoro modified nucleoside
  modified_base 5: mod_base = OTHER; note = 2'-O-methyl modified nucleoside
  modified_base 6: mod_base = OTHER; note = 2'-fluoro modified nucleoside
  modified_base 7: mod_base = OTHER; note = 2'-O-methyl modified nucleoside
  modified_base 8: mod_base = OTHER; note = 2'-fluoro modified nucleoside
  modified_base 9: mod_base = OTHER; note = 2'-O-methyl modified nucleoside
  modified_base 10: mod_base = OTHER; note = 2'-fluoro modified nucleoside
  modified_base 11: mod_base = OTHER; note = 2'-O-methyl modified nucleoside
  modified_base 12: mod_base = OTHER; note = 2'-fluoro modified nucleoside
  modified_base 13: mod_base = OTHER; note = 2'-O-methyl modified nucleoside
  modified_base 14: mod_base = OTHER; note = 2'-fluoro modified nucleoside
  modified_base 15: mod_base = OTHER; note = 2'-O-methyl modified nucleoside
  modified_base 16: mod_base = OTHER; note = 2'-fluoro modified nucleoside
  modified_base 17: mod_base = OTHER; note = 2'-O-methyl modified nucleoside
  modified_base 18: mod_base = OTHER; note = 2'-fluoro modified nucleoside
  modified_base 19: mod_base = OTHER; note = 2'-O-methyl modified nucleoside with phosphorothioate linkage
  modified_base 20: mod_base = OTHER; note = 2'-O-methyl modified nucleoside with phosphorothioate linkage
  modified_base 21: mod_base = OTHER; note = 2'-O-methyl modified nucleoside
tatttggtgcacgtaactttt

SEQ ID NO: 3186 - RNA, 21 nt, synthetic construct
  source 1..21: mol_type = other RNA
  modified_base 1: mod_base = OTHER; note = 2'-O-methyl modified nucleoside with phosphorothioate linkage
  modified_base 2: mod_base = OTHER; note = 2'-fluoro modified nucleoside with phosphorothioate linkage
  modified_base 3: mod_base = OTHER; note = 2'-O-methyl modified nucleoside
  modified_base 4: mod_base = OTHER; note = 2'-fluoro modified nucleoside
  modified_base 5: mod_base = OTHER; note = 2'-O-methyl modified nucleoside
  modified_base 6: mod_base = OTHER; note = 2'-fluoro modified nucleoside
  modified_base 7: mod_base = OTHER; note = 2'-O-methyl modified nucleoside
  modified_base 8: mod_base = OTHER; note = 2'-fluoro modified nucleoside
  modified_base 9: mod_base = OTHER; note = 2'-O-methyl modified nucleoside
  modified_base 10: mod_base = OTHER; note = 2'-fluoro modified nucleoside
  modified_base 11: mod_base = OTHER; note = 2'-O-methyl modified nucleoside
  modified_base 12: mod_base = OTHER; note = 2'-fluoro modified nucleoside
  modified_base 13: mod_base = OTHER; note = 2'-O-methyl modified nucleoside
  modified_base 14: mod_base = OTHER; note = 2'-fluoro modified nucleoside
  modified_base 15: mod_base = OTHER; note = 2'-O-methyl modified nucleoside
  modified_base 16: mod_base = OTHER; note = 2'-fluoro modified nucleoside
  modified_base 17: mod_base = OTHER; note = 2'-O-methyl modified nucleoside
  modified_base 18: mod_base = OTHER; note = 2'-fluoro modified nucleoside
  modified_base 19: mod_base = OTHER; note = 2'-O-methyl modified nucleoside with phosphorothioate linkage
  modified_base 20: mod_base = OTHER; note = 2'-O-methyl modified nucleoside with phosphorothioate linkage
  modified_base 21: mod_base = OTHER; note = 2'-O-methyl modified nucleoside
ttaatttggtgcacgtaactt

SEQ ID NO: 3187 - RNA, 21 nt, synthetic construct
  source 1..21: mol_type = other RNA
  modified_base 1: mod_base = OTHER; note = 2'-O-methyl modified nucleoside with phosphorothioate linkage
  modified_base 2: mod_base = OTHER; note = 2'-fluoro modified nucleoside with phosphorothioate linkage
  modified_base 3: mod_base = OTHER; note = 2'-O-methyl modified nucleoside
  modified_base 4: mod_base = OTHER; note = 2'-fluoro modified nucleoside
  modified_base 5: mod_base = OTHER; note = 2'-O-methyl modified nucleoside
  modified_base 6: mod_base = OTHER; note = 2'-fluoro modified nucleoside
  modified_base 7: mod_base = OTHER; note = 2'-O-methyl modified nucleoside
  modified_base 8: mod_base = OTHER; note = 2'-fluoro modified nucleoside
  modified_base 9: mod_base = OTHER; note = 2'-O-methyl modified nucleoside
  modified_base 10: mod_base = OTHER; note = 2'-fluoro modified nucleoside
  modified_base 11: mod_base = OTHER; note = 2'-O-methyl modified nucleoside
  modified_base 12: mod_base = OTHER; note = 2'-fluoro modified nucleoside
  modified_base 13: mod_base = OTHER; note = 2'-O-methyl modified nucleoside
  modified_base 14: mod_base = OTHER; note = 2'-fluoro modified nucleoside
  modified_base 15: mod_base = OTHER; note = 2'-O-methyl modified nucleoside
  modified_base 16: mod_base = OTHER; note = 2'-fluoro modified nucleoside
  modified_base 17: mod_base = OTHER; note = 2'-O-methyl modified nucleoside
  modified_base 18: mod_base = OTHER; note = 2'-fluoro modified nucleoside
  modified_base 19: mod_base = OTHER; note = 2'-O-methyl modified nucleoside with phosphorothioate linkage
  modified_base 20: mod_base = OTHER; note = 2'-O-methyl modified nucleoside with phosphorothioate linkage
  modified_base 21: mod_base = OTHER; note = 2'-O-methyl modified nucleoside
tgtctcagtgagaaaatattt

SEQ ID NO: 3188 - RNA, 21 nt, synthetic construct
  source 1..21: mol_type = other RNA
  modified_base 1: mod_base = OTHER; note = 2'-O-methyl modified nucleoside with phosphorothioate linkage
  modified_base 2: mod_base = OTHER; note = 2'-fluoro modified nucleoside with phosphorothioate linkage
  modified_base 3: mod_base = OTHER; note = 2'-O-methyl modified nucleoside
  modified_base 4: mod_base = OTHER; note = 2'-fluoro modified nucleoside
  modified_base 5: mod_base = OTHER; note = 2'-O-methyl modified nucleoside
  modified_base 6: mod_base = OTHER; note = 2'-fluoro modified nucleoside
  modified_base 7: mod_base = OTHER; note = 2'-O-methyl modified nucleoside
  modified_base 8: mod_base = OTHER; note = 2'-fluoro modified nucleoside
  modified_base 9: mod_base = OTHER; note = 2'-O-methyl modified nucleoside
  modified_base 10: mod_base = OTHER; note = 2'-fluoro modified nucleoside
  modified_base 11: mod_base = OTHER; note = 2'-O-methyl modified nucleoside
  modified_base 12: mod_base = OTHER; note = 2'-fluoro modified nucleoside
  modified_base 13: mod_base = OTHER; note = 2'-O-methyl modified nucleoside
  modified_base 14: mod_base = OTHER; note = 2'-fluoro modified nucleoside
  modified_base 15: mod_base = OTHER; note = 2'-O-methyl modified nucleoside
  modified_base 16: mod_base = OTHER; note = 2'-fluoro modified nucleoside
  modified_base 17: mod_base = OTHER; note = 2'-O-methyl modified nucleoside
  modified_base 18: mod_base = OTHER; note = 2'-fluoro modified nucleoside
  modified_base 19: mod_base = OTHER; note = 2'-O-methyl modified nucleoside with phosphorothioate linkage
  modified_base 20: mod_base = OTHER; note = 2'-O-methyl modified nucleoside with phosphorothioate linkage
  modified_base 21: mod_base = OTHER; note = 2'-O-methyl modified nucleoside
tttagtagattttgtagactt

SEQ ID NO: 3189 - RNA, 21 nt, synthetic construct
  source 1..21: mol_type = other RNA
  modified_base 1: mod_base = OTHER; note = 2'-O-methyl modified nucleoside with phosphorothioate linkage
  modified_base 2: mod_base = OTHER; note = 2'-fluoro modified nucleoside with phosphorothioate linkage
  modified_base 3: mod_base = OTHER; note = 2'-O-methyl modified nucleoside
  modified_base 4: mod_base = OTHER; note = 2'-fluoro modified nucleoside
  modified_base 5: mod_base = OTHER; note = 2'-O-methyl modified nucleoside
  modified_base 6: mod_base = OTHER; note = 2'-fluoro modified nucleoside
  modified_base 7: mod_base = OTHER; note = 2'-O-methyl modified nucleoside
  modified_base 8: mod_base = OTHER; note = 2'-fluoro modified nucleoside
  modified_base 9: mod_base = OTHER; note = 2'-O-methyl modified nucleoside
  modified_base 10: mod_base = OTHER; note = 2'-fluoro modified nucleoside
  modified_base 11: mod_base = OTHER; note = 2'-O-methyl modified nucleoside
  modified_base 12: mod_base = OTHER; note = 2'-fluoro modified nucleoside
  modified_base 13: mod_base = OTHER; note = 2'-O-methyl modified nucleoside
  modified_base 14: mod_base = OTHER; note = 2'-fluoro modified nucleoside
  modified_base 15: mod_base = OTHER; note = 2'-O-methyl modified nucleoside
  modified_base 16: mod_base = OTHER; note = 2'-fluoro modified nucleoside
  modified_base 17: mod_base = OTHER; note = 2'-O-methyl modified nucleoside
  modified_base 18: mod_base = OTHER; note = 2'-fluoro modified nucleoside
  modified_base 19: mod_base = OTHER; note = 2'-O-methyl modified nucleoside with phosphorothioate linkage
  modified_base 20: mod_base = OTHER; note = 2'-O-methyl modified nucleoside with phosphorothioate linkage
  modified_base 21: mod_base = OTHER; note = 2'-O-methyl modified nucleoside
tcatcataccgaaaagacttt

SEQ ID NO: 3190 - RNA, 21 nt, synthetic construct
  source 1..21: mol_type = other RNA
  modified_base 1: mod_base = OTHER; note = 2'-O-methyl modified nucleoside with phosphorothioate linkage
  modified_base 2: mod_base = OTHER; note = 2'-fluoro modified nucleoside with phosphorothioate linkage
  modified_base 3: mod_base = OTHER; note = 2'-O-methyl modified nucleoside
  modified_base 4: mod_base = OTHER; note = 2'-fluoro modified nucleoside
  modified_base 5: mod_base = OTHER; note = 2'-O-methyl modified nucleoside
  modified_base 6: mod_base = OTHER; note = 2'-fluoro modified nucleoside
  modified_base 7: mod_base = OTHER; note = 2'-O-methyl modified nucleoside
  modified_base 8: mod_base = OTHER; note = 2'-fluoro modified nucleoside
  modified_base 9: mod_base = OTHER; note = 2'-O-methyl modified nucleoside
  modified_base 10: mod_base = OTHER; note = 2'-fluoro modified nucleoside
  modified_base 11: mod_base = OTHER; note = 2'-O-methyl modified nucleoside
  modified_base 12: mod_base = OTHER; note = 2'-fluoro modified nucleoside
  modified_base 13: mod_base = OTHER; note = 2'-O-methyl modified nucleoside
  modified_base 14: mod_base = OTHER; note = 2'-fluoro modified nucleoside
  modified_base 15: mod_base = OTHER; note = 2'-O-methyl modified nucleoside
  modified_base 16: mod_base = OTHER; note = 2'-fluoro modified nucleoside
  modified_base 17: mod_base = OTHER; note = 2'-O-methyl modified nucleoside
  modified_base 18: mod_base = OTHER; note = 2'-fluoro modified nucleoside
  modified_base 19: mod_base = OTHER; note = 2'-O-methyl modified nucleoside with phosphorothioate linkage
  modified_base 20: mod_base = OTHER; note = 2'-O-methyl modified nucleoside with phosphorothioate linkage
  modified_base 21: mod_base = OTHER; note = 2'-O-methyl modified nucleoside
tttctcccaatatctagcctt

SEQ ID NO: 3191 - RNA, 21 nt, synthetic construct
  source 1..21: mol_type = other RNA
  modified_base 1: mod_base = OTHER; note = 2'-O-methyl modified nucleoside with phosphorothioate linkage
  modified_base 2: mod_base = OTHER; note = 2'-fluoro modified nucleoside with phosphorothioate linkage
  modified_base 3: mod_base = OTHER; note = 2'-O-methyl modified nucleoside
  modified_base 4: mod_base = OTHER; note = 2'-fluoro modified nucleoside
  modified_base 5: mod_base = OTHER; note = 2'-O-methyl modified nucleoside
  modified_base 6: mod_base = OTHER; note = 2'-fluoro modified nucleoside
  modified_base 7: mod_base = OTHER; note = 2'-O-methyl modified nucleoside
  modified_base 8: mod_base = OTHER; note = 2'-fluoro modified nucleoside
  modified_base 9: mod_base = OTHER; note = 2'-O-methyl modified nucleoside
  modified_base 10: mod_base = OTHER; note = 2'-fluoro modified nucleoside
  modified_base 11: mod_base = OTHER; note = 2'-O-methyl modified nucleoside
  modified_base 12: mod_base = OTHER; note = 2'-fluoro modified nucleoside
  modified_base 13: mod_base = OTHER; note = 2'-O-methyl modified nucleoside
  modified_base 14: mod_base = OTHER; note = 2'-fluoro modified nucleoside
  modified_base 15: mod_base = OTHER; note = 2'-O-methyl modified nucleoside
  modified_base 16: mod_base = OTHER; note = 2'-fluoro modified nucleoside
  modified_base 17: mod_base = OTHER; note = 2'-O-methyl modified nucleoside
  modified_base 18: mod_base = OTHER; note = 2'-fluoro modified nucleoside
  modified_base 19: mod_base = OTHER; note = 2'-O-methyl modified nucleoside with phosphorothioate linkage
  modified_base 20: mod_base = OTHER; note = 2'-O-methyl modified nucleoside with phosphorothioate linkage
  modified_base 21: mod_base = OTHER; note = 2'-O-methyl modified nucleoside
tttgtttctcccaatatcttt

SEQ ID NO: 3192 - RNA, 21 nt, synthetic construct
  source 1..21: mol_type = other RNA
  modified_base 1: mod_base = OTHER; note = 2'-O-methyl modified nucleoside with phosphorothioate linkage
  modified_base 2: mod_base = OTHER; note = 2'-fluoro modified nucleoside with phosphorothioate linkage
  modified_base 3: mod_base = OTHER; note = 2'-O-methyl modified nucleoside
  modified_base 4: mod_base = OTHER; note = 2'-fluoro modified nucleoside
  modified_base 5: mod_base = OTHER; note = 2'-O-methyl modified nucleoside
  modified_base 6: mod_base = OTHER; note = 2'-fluoro modified nucleoside
  modified_base 7: mod_base = OTHER; note = 2'-O-methyl modified nucleoside
  modified_base 8: mod_base = OTHER; note = 2'-fluoro modified nucleoside
  modified_base 9: mod_base = OTHER; note = 2'-O-methyl modified nucleoside
  modified_base 10: mod_base = OTHER; note = 2'-fluoro modified nucleoside
  modified_base 11: mod_base = OTHER; note = 2'-O-methyl modified nucleoside
  modified_base 12: mod_base = OTHER; note = 2'-fluoro modified nucleoside
  modified_base 13: mod_base = OTHER; note = 2'-O-methyl modified nucleoside
  modified_base 14: mod_base = OTHER; note = 2'-fluoro modified nucleoside
  modified_base 15: mod_base = OTHER; note = 2'-O-methyl modified nucleoside
  modified_base 16: mod_base = OTHER; note = 2'-fluoro modified nucleoside
  modified_base 17: mod_base = OTHER; note = 2'-O-methyl modified nucleoside
  modified_base 18: mod_base = OTHER; note = 2'-fluoro modified nucleoside
  modified_base 19: mod_base = OTHER; note = 2'-O-methyl modified nucleoside with phosphorothioate linkage
  modified_base 20: mod_base = OTHER; note = 2'-O-methyl modified nucleoside with phosphorothioate linkage
  modified_base 21: mod_base = OTHER; note = 2'-O-methyl modified nucleoside
tgagaagatccaatgtatctt

SEQ ID NO: 3193 - RNA, 21 nt, synthetic construct
  source 1..21: mol_type = other RNA
  modified_base 1: mod_base = OTHER; note = 2'-O-methyl modified nucleoside with phosphorothioate linkage
  modified_base 2: mod_base = OTHER; note = 2'-fluoro modified nucleoside with phosphorothioate linkage
  modified_base 3: mod_base = OTHER; note = 2'-O-methyl modified nucleoside
  modified_base 4: mod_base = OTHER; note = 2'-fluoro modified nucleoside
  modified_base 5: mod_base = OTHER; note = 2'-O-methyl modified nucleoside
  modified_base 6: mod_base = OTHER; note = 2'-fluoro modified nucleoside
  modified_base 7: mod_base = OTHER; note = 2'-O-methyl modified nucleoside
  modified_base 8: mod_base = OTHER; note = 2'-fluoro modified nucleoside
  modified_base 9: mod_base = OTHER; note = 2'-O-methyl modified nucleoside
  modified_base 10: mod_base = OTHER; note = 2'-fluoro modified nucleoside
  modified_base 11: mod_base = OTHER; note = 2'-O-methyl modified nucleoside
  modified_base 12: mod_base = OTHER; note = 2'-fluoro modified nucleoside
  modified_base 13: mod_base = OTHER; note = 2'-O-methyl modified nucleoside
  modified_base 14: mod_base = OTHER; note = 2'-fluoro modified nucleoside
  modified_base 15: mod_base = OTHER; note = 2'-O-methyl modified nucleoside
  modified_base 16: mod_base = OTHER; note = 2'-fluoro modified nucleoside
  modified_base 17: mod_base = OTHER; note = 2'-O-methyl modified nucleoside
  modified_base 18: mod_base = OTHER; note = 2'-fluoro modified nucleoside
  modified_base 19: mod_base = OTHER; note = 2'-O-methyl modified nucleoside with phosphorothioate linkage
  modified_base 20: mod_base = OTHER; note = 2'-O-methyl modified nucleoside with phosphorothioate linkage
  modified_base 21: mod_base = OTHER; note = 2'-O-methyl modified nucleoside
ttcctctccaatgagaagatt

SEQ ID NO: 3194 - RNA, 21 nt, synthetic construct
  source 1..21: mol_type = other RNA
  modified_base 1: mod_base = OTHER; note = 2'-O-methyl modified nucleoside with phosphorothioate linkage
  modified_base 2: mod_base = OTHER; note = 2'-fluoro modified nucleoside with phosphorothioate linkage
  modified_base 3: mod_base = OTHER; note = 2'-O-methyl modified nucleoside
  modified_base 4: mod_base = OTHER; note = 2'-fluoro modified nucleoside
  modified_base 5: mod_base = OTHER; note = 2'-O-methyl modified nucleoside
  modified_base 6: mod_base = OTHER; note = 2'-fluoro modified nucleoside
  modified_base 7: mod_base = OTHER; note = 2'-O-methyl modified nucleoside
  modified_base 8: mod_base = OTHER; note = 2'-fluoro modified nucleoside
  modified_base 9: mod_base = OTHER; note = 2'-O-methyl modified nucleoside
  modified_base 10: mod_base = OTHER; note = 2'-fluoro modified nucleoside
  modified_base 11: mod_base = OTHER; note = 2'-O-methyl modified nucleoside
  modified_base 12: mod_base = OTHER; note = 2'-fluoro modified nucleoside
  modified_base 13: mod_base = OTHER; note = 2'-O-methyl modified nucleoside
  modified_base 14: mod_base = OTHER; note = 2'-fluoro modified nucleoside
  modified_base 15: mod_base = OTHER; note = 2'-O-methyl modified nucleoside
  modified_base 16: mod_base = OTHER; note = 2'-fluoro modified nucleoside
  modified_base 17: mod_base = OTHER; note = 2'-O-methyl modified nucleoside
  modified_base 18: mod_base = OTHER; note = 2'-fluoro modified nucleoside
  modified_base 19: mod_base = OTHER; note = 2'-O-methyl modified nucleoside with phosphorothioate linkage
  modified_base 20: mod_base = OTHER; note = 2'-O-methyl modified nucleoside with phosphorothioate linkage
  modified_base 21: mod_base = OTHER; note = 2'-O-methyl modified nucleoside
ttttatcctctccaatgagtt

SEQ ID NO: 3195 - RNA, 21 nt, synthetic construct
  source 1..21: mol_type = other RNA
  modified_base 1: mod_base = OTHER; note = 2'-O-methyl modified nucleoside with phosphorothioate linkage
  modified_base 2: mod_base = OTHER; note = 2'-fluoro modified nucleoside with phosphorothioate linkage
  modified_base 3: mod_base = OTHER; note = 2'-O-methyl modified nucleoside
  modified_base 4: mod_base = OTHER; note = 2'-fluoro modified nucleoside
  modified_base 5: mod_base = OTHER; note = 2'-O-methyl modified nucleoside
  modified_base 6: mod_base = OTHER; note = 2'-fluoro modified nucleoside
  modified_base 7: mod_base = OTHER; note = 2'-O-methyl modified nucleoside
  modified_base 8: mod_base = OTHER; note = 2'-fluoro modified nucleoside
  modified_base 9: mod_base = OTHER; note = 2'-O-methyl modified nucleoside
  modified_base 10: mod_base = OTHER; note = 2'-fluoro modified nucleoside
  modified_base 11: mod_base = OTHER; note = 2'-O-methyl modified nucleoside
  modified_base 12: mod_base = OTHER; note = 2'-fluoro modified nucleoside
  modified_base 13: mod_base = OTHER; note = 2'-O-methyl modified nucleoside
  modified_base 14: mod_base = OTHER; note = 2'-fluoro modified nucleoside
  modified_base 15: mod_base = OTHER; note = 2'-O-methyl modified nucleoside
  modified_base 16: mod_base = OTHER; note = 2'-fluoro modified nucleoside
  modified_base 17: mod_base = OTHER; note = 2'-O-methyl modified nucleoside
  modified_base 18: mod_base = OTHER; note = 2'-fluoro modified nucleoside
  modified_base 19: mod_base = OTHER; note = 2'-O-methyl modified nucleoside with phosphorothioate linkage
  modified_base 20: mod_base = OTHER; note = 2'-O-methyl modified nucleoside with phosphorothioate linkage
  modified_base 21: mod_base = OTHER; note = 2'-O-methyl modified nucleoside
tgttcctgcttctttatcctt

SEQ ID NO: 3196 - RNA, 21 nt, synthetic construct
  source 1..21: mol_type = other RNA
  modified_base 1: mod_base = OTHER; note = 2'-O-methyl modified nucleoside with phosphorothioate linkage
  modified_base 2: mod_base = OTHER; note = 2'-fluoro modified nucleoside with phosphorothioate linkage
  modified_base 3: mod_base = OTHER; note = 2'-O-methyl modified nucleoside
  modified_base 4: mod_base = OTHER; note = 2'-fluoro modified nucleoside
  modified_base 5: mod_base = OTHER; note = 2'-O-methyl modified nucleoside
  modified_base 6: mod_base = OTHER; note = 2'-fluoro modified nucleoside
  modified_base 7: mod_base = OTHER; note = 2'-O-methyl modified nucleoside
  modified_base 8: mod_base = OTHER; note = 2'-fluoro modified nucleoside
  modified_base 9: mod_base = OTHER; note = 2'-O-methyl modified nucleoside
  modified_base 10: mod_base = OTHER; note = 2'-fluoro modified nucleoside
  modified_base 11: mod_base = OTHER; note = 2'-O-methyl modified nucleoside
  modified_base 12: mod_base = OTHER; note = 2'-fluoro modified nucleoside
  modified_base 13: mod_base = OTHER; note = 2'-O-methyl modified nucleoside
  modified_base 14: mod_base = OTHER; note = 2'-fluoro modified nucleoside
  modified_base 15: mod_base = OTHER; note = 2'-O-methyl modified nucleoside
  modified_base 16: mod_base = OTHER; note = 2'-fluoro modified nucleoside
  modified_base 17: mod_base = OTHER; note = 2'-O-methyl modified nucleoside
  modified_base 18: mod_base = OTHER; note = 2'-fluoro modified nucleoside
  modified_base 19: mod_base = OTHER; note = 2'-O-methyl modified nucleoside with phosphorothioate linkage
  modified_base 20: mod_base = OTHER; note = 2'-O-methyl modified nucleoside with phosphorothioate linkage
  modified_base 21: mod_base = OTHER; note = 2'-O-methyl modified nucleoside
tatccgcataactgtctcttt

SEQ ID NO: 3197 - RNA, 21 nt, synthetic construct
  source 1..21: mol_type = other RNA
  modified_base 1: mod_base = OTHER; note = 2'-O-methyl modified nucleoside with phosphorothioate linkage
  modified_base 2: mod_base = OTHER; note = 2'-fluoro modified nucleoside with phosphorothioate linkage
  modified_base 3: mod_base = OTHER; note = 2'-O-methyl modified nucleoside
  modified_base 4: mod_base = OTHER; note = 2'-fluoro modified nucleoside
  modified_base 5: mod_base = OTHER; note = 2'-O-methyl modified nucleoside
  modified_base 6: mod_base = OTHER; note = 2'-fluoro modified nucleoside
  modified_base 7: mod_base = OTHER; note = 2'-O-methyl modified nucleoside
  modified_base 8: mod_base = OTHER; note = 2'-fluoro modified nucleoside
  modified_base 9: mod_base = OTHER; note = 2'-O-methyl modified nucleoside
  modified_base 10: mod_base = OTHER; note = 2'-fluoro modified nucleoside
  modified_base 11: mod_base = OTHER; note = 2'-O-methyl modified nucleoside
  modified_base 12: mod_base = OTHER; note = 2'-fluoro modified nucleoside
  modified_base 13: mod_base = OTHER; note = 2'-O-methyl modified nucleoside
  modified_base 14: mod_base = OTHER; note = 2'-fluoro modified nucleoside
  modified_base 15: mod_base = OTHER; note = 2'-O-methyl modified nucleoside
  modified_base 16: mod_base = OTHER; note = 2'-fluoro modified nucleoside
  modified_base 17: mod_base = OTHER; note = 2'-O-methyl modified nucleoside
  modified_base 18: mod_base = OTHER; note = 2'-fluoro modified nucleoside
  modified_base 19: mod_base = OTHER; note = 2'-O-methyl modified nucleoside with phosphorothioate linkage
  modified_base 20: mod_base = OTHER; note = 2'-O-methyl modified nucleoside with phosphorothioate linkage
  modified_base 21: mod_base = OTHER; note = 2'-O-methyl modified nucleoside
tgaatccgcataactgtcttt

SEQ ID NO: 3198 - RNA, 21 nt, synthetic construct
  source 1..21: mol_type = other RNA
  modified_base 1: mod_base = OTHER; note = 2'-O-methyl modified nucleoside with phosphorothioate linkage
  modified_base 2: mod_base = OTHER; note = 2'-fluoro modified nucleoside with phosphorothioate linkage
  modified_base 3: mod_base = OTHER; note = 2'-O-methyl modified nucleoside
  modified_base 4: mod_base = OTHER; note = 2'-fluoro modified nucleoside
  modified_base 5: mod_base = OTHER; note = 2'-O-methyl modified nucleoside
  modified_base 6: mod_base = OTHER; note = 2'-fluoro modified nucleoside
  modified_base 7: mod_base = OTHER; note = 2'-O-methyl modified nucleoside
  modified_base 8: mod_base = OTHER; note = 2'-fluoro modified nucleoside
  modified_base 9: mod_base = OTHER; note = 2'-O-methyl modified nucleoside
  modified_base 10: mod_base = OTHER; note = 2'-fluoro modified nucleoside
  modified_base 11: mod_base = OTHER; note = 2'-O-methyl modified nucleoside
  modified_base 12: mod_base = OTHER; note = 2'-fluoro modified nucleoside
  modified_base 13: mod_base = OTHER; note = 2'-O-methyl modified nucleoside
  modified_base 14: mod_base = OTHER; note = 2'-fluoro modified nucleoside
  modified_base 15: mod_base = OTHER; note = 2'-O-methyl modified nucleoside
  modified_base 16: mod_base = OTHER; note = 2'-fluoro modified nucleoside
  modified_base 17: mod_base = OTHER; note = 2'-O-methyl modified nucleoside
  modified_base 18: mod_base = OTHER; note = 2'-fluoro modified nucleoside
  modified_base 19: mod_base = OTHER; note = 2'-O-methyl modified nucleoside with phosphorothioate linkage
  modified_base 20: mod_base = OTHER; note = 2'-O-methyl modified nucleoside with phosphorothioate linkage
  modified_base 21: mod_base = OTHER; note = 2'-O-methyl modified nucleoside
tagagaatccgcataactgtt

SEQ ID NO: 3199 - RNA, 21 nt, synthetic construct
  source 1..21: mol_type = other RNA
  modified_base 1: mod_base = OTHER; note = 2'-O-methyl modified nucleoside with phosphorothioate linkage
  modified_base 2: mod_base = OTHER; note = 2'-fluoro modified nucleoside with phosphorothioate linkage
  modified_base 3: mod_base = OTHER; note = 2'-O-methyl modified nucleoside
  modified_base 4: mod_base = OTHER; note = 2'-fluoro modified nucleoside
  modified_base 5: mod_base = OTHER; note = 2'-O-methyl modified nucleoside
  modified_base 6: mod_base = OTHER; note = 2'-fluoro modified nucleoside
  modified_base 7: mod_base = OTHER; note = 2'-O-methyl modified nucleoside
  modified_base 8: mod_base = OTHER; note = 2'-fluoro modified nucleoside
  modified_base 9: mod_base = OTHER; note = 2'-O-methyl modified nucleoside
  modified_base 10: mod_base = OTHER; note = 2'-fluoro modified nucleoside
  modified_base 11: mod_base = OTHER; note = 2'-O-methyl modified nucleoside
  modified_base 12: mod_base = OTHER; note = 2'-fluoro modified nucleoside
  modified_base 13: mod_base = OTHER; note = 2'-O-methyl modified nucleoside
  modified_base 14: mod_base = OTHER; note = 2'-fluoro modified nucleoside
  modified_base 15: mod_base = OTHER; note = 2'-O-methyl modified nucleoside
  modified_base 16: mod_base = OTHER; note = 2'-fluoro modified nucleoside
  modified_base 17: mod_base = OTHER; note = 2'-O-methyl modified nucleoside
  modified_base 18: mod_base = OTHER; note = 2'-fluoro modified nucleoside
  modified_base 19: mod_base = OTHER; note = 2'-O-methyl modified nucleoside with phosphorothioate linkage
  modified_base 20: mod_base = OTHER; note = 2'-O-methyl modified nucleoside with phosphorothioate linkage
  modified_base 21: mod_base = OTHER; note = 2'-O-methyl modified nucleoside
ttcaagagaatccgcataatt

SEQ ID NO: 3200 - RNA, 21 nt, synthetic construct
  source 1..21: mol_type = other RNA
  modified_base 1: mod_base = OTHER; note = 2'-O-methyl modified nucleoside with phosphorothioate linkage
  modified_base 2: mod_base = OTHER; note = 2'-fluoro modified nucleoside with phosphorothioate linkage
  modified_base 3: mod_base = OTHER; note = 2'-O-methyl modified nucleoside
  modified_base 4: mod_base = OTHER; note = 2'-fluoro modified nucleoside
  modified_base 5: mod_base = OTHER; note = 2'-O-methyl modified nucleoside
  modified_base 6: mod_base = OTHER; note = 2'-fluoro modified nucleoside
  modified_base 7: mod_base = OTHER; note = 2'-O-methyl modified nucleoside
  modified_base 8: mod_base = OTHER; note = 2'-fluoro modified nucleoside
  modified_base 9: mod_base = OTHER; note = 2'-O-methyl modified nucleoside
  modified_base 10: mod_base = OTHER; note = 2'-fluoro modified nucleoside
  modified_base 11: mod_base = OTHER; note = 2'-O-methyl modified nucleoside
  modified_base 12: mod_base = OTHER; note = 2'-fluoro modified nucleoside
  modified_base 13: mod_base = OTHER; note = 2'-O-methyl modified nucleoside
  modified_base 14: mod_base = OTHER; note = 2'-fluoro modified nucleoside
  modified_base 15: mod_base = OTHER; note = 2'-O-methyl modified nucleoside
  modified_base 16: mod_base = OTHER; note = 2'-fluoro modified nucleoside
  modified_base 17: mod_base = OTHER; note = 2'-O-methyl modified nucleoside
  modified_base 18: mod_base = OTHER; note = 2'-fluoro modified nucleoside
  modified_base 19: mod_base = OTHER; note = 2'-O-methyl modified nucleoside with phosphorothioate linkage
  modified_base 20: mod_base = OTHER; note = 2'-O-methyl modified nucleoside with phosphorothioate linkage
  modified_base 21: mod_base = OTHER; note = 2'-O-methyl modified nucleoside
ttttttcaagagaatccgctt

SEQ ID NO: 3201 - RNA, 21 nt, synthetic construct
  source 1..21: mol_type = other RNA
  modified_base 1: mod_base = OTHER; note = 2'-O-methyl modified nucleoside with phosphorothioate linkage
  modified_base 2: mod_base = OTHER; note = 2'-fluoro modified nucleoside with phosphorothioate linkage
  modified_base 3: mod_base = OTHER; note = 2'-O-methyl modified nucleoside
  modified_base 4: mod_base = OTHER; note = 2'-fluoro modified nucleoside
  modified_base 5: mod_base = OTHER; note = 2'-O-methyl modified nucleoside
  modified_base 6: mod_base = OTHER; note = 2'-fluoro modified nucleoside
  modified_base 7: mod_base = OTHER; note = 2'-O-methyl modified nucleoside
  modified_base 8: mod_base = OTHER; note = 2'-fluoro modified nucleoside
  modified_base 9: mod_base = OTHER; note = 2'-O-methyl modified nucleoside
  modified_base 10: mod_base = OTHER; note = 2'-fluoro modified nucleoside
  modified_base 11: mod_base = OTHER; note = 2'-O-methyl modified nucleoside
  modified_base 12: mod_base = OTHER; note = 2'-fluoro modified nucleoside
  modified_base 13: mod_base = OTHER; note = 2'-O-methyl modified nucleoside
  modified_base 14: mod_base = OTHER; note = 2'-fluoro modified nucleoside
  modified_base 15: mod_base = OTHER; note = 2'-O-methyl modified nucleoside
  modified_base 16: mod_base = OTHER; note = 2'-fluoro modified nucleoside
  modified_base 17: mod_base = OTHER; note = 2'-O-methyl modified nucleoside
  modified_base 18: mod_base = OTHER; note = 2'-fluoro modified nucleoside
  modified_base 19: mod_base = OTHER; note = 2'-O-methyl modified nucleoside with phosphorothioate linkage
  modified_base 20: mod_base = OTHER; note = 2'-O-methyl modified nucleoside with phosphorothioate linkage
  modified_base 21: mod_base = OTHER; note = 2'-O-methyl modified nucleoside
tcactctgtatttttcacttt

SEQ ID NO: 3202 - RNA, 21 nt, synthetic construct
  source 1..21: mol_type = other RNA
  modified_base 1: mod_base = OTHER; note = 2'-O-methyl modified nucleoside with phosphorothioate linkage
  modified_base 2: mod_base = OTHER; note = 2'-fluoro modified nucleoside with phosphorothioate linkage
  modified_base 3: mod_base = OTHER; note = 2'-O-methyl modified nucleoside
  modified_base 4: mod_base = OTHER; note = 2'-fluoro modified nucleoside
  modified_base 5: mod_base = OTHER; note = 2'-O-methyl modified nucleoside
  modified_base 6: mod_base = OTHER; note = 2'-fluoro modified nucleoside
  modified_base 7: mod_base = OTHER; note = 2'-O-methyl modified nucleoside
  modified_base 8: mod_base = OTHER; note = 2'-fluoro modified nucleoside
  modified_base 9: mod_base = OTHER; note = 2'-O-methyl modified nucleoside
  modified_base 10: mod_base = OTHER; note = 2'-fluoro modified nucleoside
  modified_base 11: mod_base = OTHER; note = 2'-O-methyl modified nucleoside
  modified_base 12: mod_base = OTHER; note = 2'-fluoro modified nucleoside
  modified_base 13: mod_base = OTHER; note = 2'-O-methyl modified nucleoside
  modified_base 14: mod_base = OTHER; note = 2'-fluoro modified nucleoside
  modified_base 15: mod_base = OTHER; note = 2'-O-methyl modified nucleoside
  modified_base 16: mod_base = OTHER; note = 2'-fluoro modified nucleoside
  modified_base 17: mod_base = OTHER; note = 2'-O-methyl modified nucleoside
  modified_base 18: mod_base = OTHER; note = 2'-fluoro modified nucleoside
  modified_base 19: mod_base = OTHER; note = 2'-O-methyl modified nucleoside with phosphorothioate linkage
  modified_base 20: mod_base = OTHER; note = 2'-O-methyl modified nucleoside with phosphorothioate linkage
  modified_base 21: mod_base = OTHER; note = 2'-O-methyl modified nucleoside
tttaaacttttccaccgcctt

SEQ ID NO: 3203 - RNA, 21 nt, synthetic construct
  source 1..21: mol_type = other RNA
  modified_base 1: mod_base = OTHER; note = 2'-O-methyl modified nucleoside with phosphorothioate linkage
  modified_base 2: mod_base = OTHER; note = 2'-fluoro modified nucleoside with phosphorothioate linkage
  modified_base 3: mod_base = OTHER; note = 2'-O-methyl modified nucleoside
  modified_base 4: mod_base = OTHER; note = 2'-fluoro modified nucleoside
  modified_base 5: mod_base = OTHER; note = 2'-O-methyl modified nucleoside
  modified_base 6: mod_base = OTHER; note = 2'-fluoro modified nucleoside
  modified_base 7: mod_base = OTHER; note = 2'-O-methyl modified nucleoside
  modified_base 8: mod_base = OTHER; note = 2'-fluoro modified nucleoside
  modified_base 9: mod_base = OTHER; note = 2'-O-methyl modified nucleoside
  modified_base 10: mod_base = OTHER; note = 2'-fluoro modified nucleoside
  modified_base 11: mod_base = OTHER; note = 2'-O-methyl modified nucleoside
  modified_base 12: mod_base = OTHER; note = 2'-fluoro modified nucleoside
  modified_base 13: mod_base = OTHER; note = 2'-O-methyl modified nucleoside
  modified_base 14: mod_base = OTHER; note = 2'-fluoro modified nucleoside
  modified_base 15: mod_base = OTHER; note = 2'-O-methyl modified nucleoside
  modified_base 16: mod_base = OTHER; note = 2'-fluoro modified nucleoside
  modified_base 17: mod_base = OTHER; note = 2'-O-methyl modified nucleoside
  modified_base 18: mod_base = OTHER; note = 2'-fluoro modified nucleoside
  modified_base 19: mod_base = OTHER; note = 2'-O-methyl modified nucleoside with phosphorothioate linkage
  modified_base 20: mod_base = OTHER; note = 2'-O-methyl modified nucleoside with phosphorothioate linkage
  modified_base 21: mod_base = OTHER; note = 2'-O-methyl modified nucleoside
ttttaaacttttccaccgctt

SEQ ID NO: 3204 - RNA, 21 nt, synthetic construct
  source 1..21: mol_type = other RNA
  modified_base 1: mod_base = OTHER; note = 2'-O-methyl modified nucleoside with phosphorothioate linkage
  modified_base 2: mod_base = OTHER; note = 2'-fluoro modified nucleoside with phosphorothioate linkage
  modified_base 3: mod_base = OTHER; note = 2'-O-methyl modified nucleoside
  modified_base 4: mod_base = OTHER; note = 2'-fluoro modified nucleoside
  modified_base 5: mod_base = OTHER; note = 2'-O-methyl modified nucleoside
  modified_base 6: mod_base = OTHER; note = 2'-fluoro modified nucleoside
  modified_base 7: mod_base = OTHER; note = 2'-O-methyl modified nucleoside
  modified_base 8: mod_base = OTHER; note = 2'-fluoro modified nucleoside
  modified_base 9: mod_base = OTHER; note = 2'-O-methyl modified nucleoside
  modified_base 10: mod_base = OTHER; note = 2'-fluoro modified nucleoside
  modified_base 11: mod_base = OTHER; note = 2'-O-methyl modified nucleoside
  modified_base 12: mod_base = OTHER; note = 2'-fluoro modified nucleoside
  modified_base 13: mod_base = OTHER; note = 2'-O-methyl modified nucleoside
  modified_base 14: mod_base = OTHER; note = 2'-fluoro modified nucleoside
  modified_base 15: mod_base = OTHER; note = 2'-O-methyl modified nucleoside
  modified_base 16: mod_base = OTHER; note = 2'-fluoro modified nucleoside
  modified_base 17: mod_base = OTHER; note = 2'-O-methyl modified nucleoside
  modified_base 18: mod_base = OTHER; note = 2'-fluoro modified nucleoside
  modified_base 19: mod_base = OTHER; note = 2'-O-methyl modified nucleoside with phosphorothioate linkage
  modified_base 20: mod_base = OTHER; note = 2'-O-methyl modified nucleoside with phosphorothioate linkage
  modified_base 21: mod_base = OTHER; note = 2'-O-methyl modified nucleoside
ttcttaggcaactttaaactt

SEQ ID NO: 3205 - RNA, 21 nt, synthetic construct
  source 1..21: mol_type = other RNA
  modified_base 1: mod_base = OTHER; note = 2'-O-methyl modified nucleoside with phosphorothioate linkage
  modified_base 2: mod_base = OTHER; note = 2'-fluoro modified nucleoside with phosphorothioate linkage
  modified_base 3: mod_base = OTHER; note = 2'-O-methyl modified nucleoside
  modified_base 4: mod_base = OTHER; note = 2'-fluoro modified nucleoside
  modified_base 5: mod_base = OTHER; note = 2'-O-methyl modified nucleoside
  modified_base 6: mod_base = OTHER; note = 2'-fluoro modified nucleoside
  modified_base 7: mod_base = OTHER; note = 2'-O-methyl modified nucleoside
  modified_base 8: mod_base = OTHER; note = 2'-fluoro modified nucleoside
  modified_base 9: mod_base = OTHER; note = 2'-O-methyl modified nucleoside
  modified_base 10: mod_base = OTHER; note = 2'-fluoro modified nucleoside
  modified_base 11: mod_base = OTHER; note = 2'-O-methyl modified nucleoside
  modified_base 12: mod_base = OTHER; note = 2'-fluoro modified nucleoside
  modified_base 13: mod_base = OTHER; note = 2'-O-methyl modified nucleoside
  modified_base 14: mod_base = OTHER; note = 2'-fluoro modified nucleoside
  modified_base 15: mod_base = OTHER; note = 2'-O-methyl modified nucleoside
  modified_base 16: mod_base = OTHER; note = 2'-fluoro modified nucleoside
  modified_base 17: mod_base = OTHER; note = 2'-O-methyl modified nucleoside
  modified_base 18: mod_base = OTHER; note = 2'-fluoro modified nucleoside
  modified_base 19: mod_base = OTHER; note = 2'-O-methyl modified nucleoside with phosphorothioate linkage
  modified_base 20: mod_base = OTHER; note = 2'-O-methyl modified nucleoside with phosphorothioate linkage
  modified_base 21: mod_base = OTHER; note = 2'-O-methyl modified nucleoside
ttaccactagaaagcagcttt

SEQ ID NO: 3206 - RNA, 21 nt, synthetic construct
  source 1..21: mol_type = other RNA
  modified_base 1: mod_base = OTHER; note = 2'-O-methyl modified nucleoside with phosphorothioate linkage
  modified_base 2: mod_base = OTHER; note = 2'-fluoro modified nucleoside with phosphorothioate linkage
  modified_base 3: mod_base = OTHER; note = 2'-O-methyl modified nucleoside
  modified_base 4: mod_base = OTHER; note = 2'-O-methyl modified nucleoside
  modified_base 5: mod_base = OTHER; note = 2'-O-methyl modified nucleoside
  modified_base 6: mod_base = OTHER; note = 2'-fluoro modified nucleoside
  modified_base 7: mod_base = OTHER; note = 2'-O-methyl modified nucleoside
  modified_base 8: mod_base = OTHER; note = 2'-fluoro modified nucleoside
  modified_base 9: mod_base = OTHER; note = 2'-O-methyl modified nucleoside
  modified_base 10: mod_base = OTHER; note = 2'-fluoro modified nucleoside
  modified_base 11: mod_base = OTHER; note = 2'-O-methyl modified nucleoside
  modified_base 12: mod_base = OTHER; note = 2'-fluoro modified nucleoside
  modified_base 13: mod_base = OTHER; note = 2'-O-methyl modified nucleoside
  modified_base 14: mod_base = OTHER; note = 2'-fluoro modified nucleoside
  modified_base 15: mod_base = OTHER; note = 2'-O-methyl modified nucleoside
  modified_base 16: mod_base = OTHER; note = 2'-fluoro modified nucleoside
  modified_base 17: mod_base = OTHER; note = 2'-O-methyl modified nucleoside
  modified_base 18: mod_base = OTHER; note = 2'-fluoro modified nucleoside
  modified_base 19: mod_base = OTHER; note = 2'-O-methyl modified nucleoside with phosphorothioate linkage
  modified_base 20: mod_base = OTHER; note = 2'-O-methyl modified nucleoside with phosphorothioate linkage
  modified_base 21: mod_base = OTHER; note = 2'-O-methyl modified nucleoside
tagtatcgattccaggaagtt

SEQ ID NO: 3207 - RNA, 21 nt, synthetic construct
  source 1..21: mol_type = other RNA
  modified_base 1: mod_base = OTHER; note = 2'-O-methyl modified nucleoside with phosphorothioate linkage
  modified_base 2: mod_base = OTHER; note = 2'-fluoro modified nucleoside with phosphorothioate linkage
  modified_base 3: mod_base = OTHER; note = 2'-O-methyl modified nucleoside
  modified_base 4: mod_base = OTHER; note = 2'-O-methyl modified nucleoside
  modified_base 5: mod_base = OTHER; note = 2'-O-methyl modified nucleoside
  modified_base 6: mod_base = OTHER; note = 2'-O-methyl modified nucleoside
  modified_base 7: mod_base = OTHER; note = 2'-fluoro modified nucleoside
  modified_base 8: mod_base = OTHER; note = 2'-O-methyl modified nucleoside
  modified_base 9: mod_base = OTHER; note = 2'-O-methyl modified nucleoside
  modified_base 10: mod_base = OTHER; note = 2'-fluoro modified nucleoside
  modified_base 11: mod_base = OTHER; note = 2'-O-methyl modified nucleoside
  modified_base 12: mod_base = OTHER; note = 2'-fluoro modified nucleoside
  modified_base 13: mod_base = OTHER; note = 2'-O-methyl modified nucleoside
  modified_base 14: mod_base = OTHER; note = 2'-fluoro modified nucleoside
  modified_base 15: mod_base = OTHER; note = 2'-O-methyl modified nucleoside
  modified_base 16: mod_base = OTHER; note = 2'-fluoro modified nucleoside
  modified_base 17: mod_base = OTHER; note = 2'-O-methyl modified nucleoside
  modified_base 18: mod_base = OTHER; note = 2'-fluoro modified nucleoside
  modified_base 19: mod_base = OTHER; note = 2'-O-methyl modified nucleoside with phosphorothioate linkage
  modified_base 20: mod_base = OTHER; note = 2'-O-methyl modified nucleoside with phosphorothioate linkage
  modified_base 21: mod_base = OTHER; note = 2'-O-methyl modified nucleoside
tagtatcgattccaggaagtt

SEQ ID NO: 3208 - RNA, 21 nt, synthetic construct
  source 1..21: mol_type = other RNA
  modified_base 1: mod_base = OTHER; note = 2'-O-methyl modified nucleoside with phosphorothioate linkage
  modified_base 2: mod_base = OTHER; note = 2'-fluoro modified nucleoside with phosphorothioate linkage
  modified_base 3: mod_base = OTHER; note = 2'-O-methyl modified nucleoside
  modified_base 4: mod_base = OTHER; note = 2'-O-methyl modified nucleoside
  modified_base 5: mod_base = OTHER; note = 2'-O-methyl modified nucleoside
  modified_base 6: mod_base = OTHER; note = 2'-O-methyl modified nucleoside
  modified_base 7: mod_base = OTHER; note = 2'-fluoro modified nucleoside
  modified_base 8: mod_base = OTHER; note = 2'-O-methyl modified nucleoside
  modified_base 9: mod_base = OTHER; note = 2'-fluoro modified nucleoside
  modified_base 10: mod_base = OTHER; note = 2'-O-methyl modified nucleoside
  modified_base 11: mod_base = OTHER; note = 2'-O-methyl modified nucleoside
  modified_base 12: mod_base = OTHER; note = 2'-fluoro modified nucleoside
  modified_base 13: mod_base = OTHER; note = 2'-O-methyl modified nucleoside
  modified_base 14: mod_base = OTHER; note = 2'-fluoro modified nucleoside
  modified_base 15: mod_base = OTHER; note = 2'-O-methyl modified nucleoside
  modified_base 16: mod_base = OTHER; note = 2'-fluoro modified nucleoside
  modified_base 17: mod_base = OTHER; note = 2'-O-methyl modified nucleoside
  modified_base 18: mod_base = OTHER; note = 2'-fluoro modified nucleoside
  modified_base 19: mod_base = OTHER; note = 2'-O-methyl modified nucleoside with phosphorothioate linkage
  modified_base 20: mod_base = OTHER; note = 2'-O-methyl modified nucleoside with phosphorothioate linkage
  modified_base 21: mod_base = OTHER; note = 2'-O-methyl modified nucleoside
tagtatcgattccaggaagtt

SEQ ID NO: 3209 - RNA, 21 nt, synthetic construct
  source 1..21: mol_type = other RNA
  modified_base 1: mod_base = OTHER; note = 2'-O-methyl modified nucleoside with phosphorothioate linkage
  modified_base 2: mod_base = OTHER; note = 2'-fluoro modified nucleoside with phosphorothioate linkage
  modified_base 3: mod_base = OTHER; note = 2'-O-methyl modified nucleoside
  modified_base 4: mod_base = OTHER; note = 2'-O-methyl modified nucleoside
  modified_base 5: mod_base = OTHER; note = 2'-O-methyl modified nucleoside
  modified_base 6: mod_base = OTHER; note = 2'-O-methyl modified nucleoside
  modified_base 7: mod_base = OTHER; note = 2'-fluoro modified nucleoside
  modified_base 8: mod_base = OTHER; note = 2'-O-methyl modified nucleoside
  modified_base 9: mod_base = OTHER; note = 2'-fluoro modified nucleoside
  modified_base 10: mod_base = OTHER; note = 2'-O-methyl modified nucleoside
  modified_base 11: mod_base = OTHER; note = 2'-O-methyl modified nucleoside
  modified_base 12: mod_base = OTHER; note = 2'-O-methyl modified nucleoside
  modified_base 13: mod_base = OTHER; note = 2'-O-methyl modified nucleoside
  modified_base 14: mod_base = OTHER; note = 2'-fluoro modified nucleoside
  modified_base 15: mod_base = OTHER; note = 2'-O-methyl modified nucleoside
  modified_base 16: mod_base = OTHER; note = 2'-fluoro modified nucleoside
  modified_base 17: mod_base = OTHER; note = 2'-O-methyl modified nucleoside
  modified_base 18: mod_base = OTHER; note = 2'-fluoro modified nucleoside
  modified_base 19: mod_base = OTHER; note = 2'-O-methyl modified nucleoside with phosphorothioate linkage
  modified_base 20: mod_base = OTHER; note = 2'-O-methyl modified nucleoside with phosphorothioate linkage
  modified_base 21: mod_base = OTHER; note = 2'-O-methyl modified nucleoside
tagtatcgattccaggaagtt

SEQ ID NO: 3210 - RNA, 21 nt, synthetic construct
  source 1..21: mol_type = other RNA
  modified_base 1: mod_base = OTHER; note = 2'-O-methyl modified nucleoside with phosphorothioate linkage
  modified_base 2: mod_base = OTHER; note = 2'-fluoro modified nucleoside with phosphorothioate linkage
  modified_base 3: mod_base = OTHER; note = 2'-O-methyl modified nucleoside
  modified_base 4: mod_base = OTHER; note = 2'-O-methyl modified nucleoside
  modified_base 5: mod_base = OTHER; note = 2'-fluoro modified nucleoside
  modified_base 6: mod_base = OTHER; note = 2'-O-methyl modified nucleoside
  modified_base 7: mod_base = OTHER; note = 2'-fluoro modified nucleoside
  modified_base 8: mod_base = OTHER; note = 2'-O-methyl modified nucleoside
  modified_base 9: mod_base = OTHER; note = 2'-fluoro modified nucleoside
  modified_base 10: mod_base = OTHER; note = 2'-O-methyl modified nucleoside
  modified_base 11: mod_base = OTHER; note = 2'-O-methyl modified nucleoside
  modified_base 12: mod_base = OTHER; note = 2'-O-methyl modified nucleoside
  modified_base 13: mod_base = OTHER; note = 2'-O-methyl modified nucleoside
  modified_base 14: mod_base = OTHER; note = 2'-fluoro modified nucleoside
  modified_base 15: mod_base = OTHER; note = 2'-O-methyl modified nucleoside
  modified_base 16: mod_base = OTHER; note = 2'-fluoro modified nucleoside
  modified_base 17: mod_base = OTHER; note = 2'-O-methyl modified nucleoside
  modified_base 18: mod_base = OTHER; note = 2'-fluoro modified nucleoside
  modified_base 19: mod_base = OTHER; note = 2'-O-methyl modified nucleoside with phosphorothioate linkage
  modified_base 20: mod_base = OTHER; note = 2'-O-methyl modified nucleoside with phosphorothioate linkage
  modified_base 21: mod_base = OTHER; note = 2'-O-methyl modified nucleoside
tagtatcgattccaggaagtt

SEQ ID NO: 3211 - RNA, 21 nt, synthetic construct
  source 1..21: mol_type = other RNA
  modified_base 1: mod_base = OTHER; note = 2'-O-methyl modified nucleoside with phosphorothioate linkage
  modified_base 2: mod_base = OTHER; note = 2'-fluoro modified nucleoside with phosphorothioate linkage
  modified_base 3: mod_base = OTHER; note = 2'-O-methyl modified nucleoside
  modified_base 4: mod_base = OTHER; note = 2'-fluoro modified nucleoside
  modified_base 5: mod_base = OTHER; note = 2'-O-methyl modified nucleoside
  modified_base 6: mod_base = OTHER; note = 2'-fluoro modified nucleoside
  modified_base 7: mod_base = OTHER; note = 2'-O-methyl modified nucleoside
  modified_base 8: mod_base = OTHER; note = 2'-fluoro modified nucleoside
  modified_base 9: mod_base = OTHER; note = 2'-O-methyl modified nucleoside
  modified_base 10: mod_base = OTHER; note = 2'-O-methyl modified nucleoside
  modified_base 11: mod_base = OTHER; note = 2'-O-methyl modified nucleoside
  modified_base 12: mod_base = OTHER; note = 2'-O-methyl modified nucleoside
  modified_base 13: mod_base = OTHER; note = 2'-O-methyl modified nucleoside
  modified_base 14: mod_base = OTHER; note = 2'-fluoro modified nucleoside
  modified_base 15: mod_base = OTHER; note = 2'-O-methyl modified nucleoside
  modified_base 16: mod_base = OTHER; note = 2'-fluoro modified nucleoside
  modified_base 17: mod_base = OTHER; note = 2'-O-methyl modified nucleoside
  modified_base 18: mod_base = OTHER; note = 2'-fluoro modified nucleoside
  modified_base 19: mod_base = OTHER; note = 2'-O-methyl modified nucleoside with phosphorothioate linkage
  modified_base 20: mod_base = OTHER; note = 2'-O-methyl modified nucleoside with phosphorothioate linkage
  modified_base 21: mod_base = OTHER; note = 2'-O-methyl modified nucleoside
tagtatcgattccaggaagtt

SEQ ID NO: 3212 - RNA, 21 nt, synthetic construct
  source 1..21: mol_type = other RNA
  modified_base 1: mod_base = OTHER; note = 2'-O-methyl modified nucleoside with phosphorothioate linkage
  modified_base 2: mod_base = OTHER; note = 2'-fluoro modified nucleoside with phosphorothioate linkage
  modified_base 3: mod_base = OTHER; note = 2'-O-methyl modified nucleoside
  modified_base 4: mod_base = OTHER; note = 2'-O-methyl modified nucleoside
  modified_base 5: mod_base = OTHER; note = 2'-O-methyl modified nucleoside
  modified_base 6: mod_base = OTHER; note = 2'-fluoro modified nucleoside
  modified_base 7: mod_base = OTHER; note = 2'-O-methyl modified nucleoside
  modified_base 8: mod_base = OTHER; note = 2'-fluoro modified nucleoside
  modified_base 9: mod_base = OTHER; note = 2'-O-methyl modified nucleoside
  modified_base 10: mod_base = OTHER; note = 2'-fluoro modified nucleoside
  modified_base 11: mod_base = OTHER; note = 2'-O-methyl modified nucleoside
  modified_base 12: mod_base = OTHER; note = 2'-O-methyl modified nucleoside
  modified_base 13: mod_base = OTHER; note = 2'-O-methyl modified nucleoside
  modified_base 14: mod_base = OTHER; note = 2'-fluoro modified nucleoside
  modified_base 15: mod_base = OTHER; note = 2'-O-methyl modified nucleoside
  modified_base 16: mod_base = OTHER; note = 2'-fluoro modified nucleoside
  modified_base 17: mod_base = OTHER; note = 2'-O-methyl modified nucleoside
  modified_base 18: mod_base = OTHER; note = 2'-fluoro modified nucleoside
  modified_base 19: mod_base = OTHER; note = 2'-O-methyl modified nucleoside with phosphorothioate linkage
  modified_base 20: mod_base = OTHER; note = 2'-O-methyl modified nucleoside with phosphorothioate linkage
  modified_base 21: mod_base = OTHER; note = 2'-O-methyl modified nucleoside
tagtatcgattccaggaagtt

SEQ ID NO: 3213-3237 - skipped (25 entries)

SEQ ID NO: 3238 - RNA, 21 nt, synthetic construct
  source 1..21: mol_type = other RNA
  misc_feature 1: note = ETL3 moiety
  modified_base 1: mod_base = OTHER; note = 2'-O-methyl modified nucleoside
  modified_base 2: mod_base = OTHER; note = 2'-O-methyl modified nucleoside
  modified_base 3: mod_base = OTHER; note = 2'-fluoro modified nucleoside
  modified_base 4: mod_base = OTHER; note = 2'-O-methyl modified nucleoside
  modified_base 5: mod_base = OTHER; note = 2'-fluoro modified nucleoside
  modified_base 6: mod_base = OTHER; note = 2'-O-methyl modified nucleoside
  modified_base 7: mod_base = OTHER; note = 2'-fluoro modified nucleoside
  modified_base 8: mod_base = OTHER; note = 2'-O-methyl modified nucleoside
  modified_base 9: mod_base = OTHER; note = 2'-fluoro modified nucleoside
  modified_base 10: mod_base = OTHER; note = 2'-O-methyl modified nucleoside
  modified_base 11: mod_base = OTHER; note = 2'-fluoro modified nucleoside
  modified_base 12: mod_base = OTHER; note = 2'-O-methyl modified nucleoside
  modified_base 13: mod_base = OTHER; note = 2'-fluoro modified nucleoside
  modified_base 14: mod_base = OTHER; note = 2'-O-methyl modified nucleoside
  modified_base 15: mod_base = OTHER; note = 2'-O-methyl modified nucleoside
  modified_base 16: mod_base = OTHER; note = 2'-O-methyl modified nucleoside
  modified_base 17: mod_base = OTHER; note = 2'-fluoro modified nucleoside
  modified_base 18: mod_base = OTHER; note = 2'-O-methyl modified nucleoside
  modified_base 19: mod_base = OTHER; note = 2'-fluoro modified nucleoside with phosphorothioate linkage
  modified_base 20: mod_base = OTHER; note = 2'-O-methyl modified nucleoside with phosphorothioate linkage
  modified_base 21: mod_base = OTHER; note = 2'-O-methyl modified nucleoside
ctacaaaggtgaactcagatt

SEQ ID NO: 3239 - RNA, 21 nt, synthetic construct
  source 1..21: mol_type = other RNA
  misc_feature 1: note = ETL20 moiety
  modified_base 1: mod_base = OTHER; note = 2'-O-methyl modified nucleoside
  modified_base 2: mod_base = OTHER; note = 2'-O-methyl modified nucleoside
  modified_base 3: mod_base = OTHER; note = 2'-fluoro modified nucleoside
  modified_base 4: mod_base = OTHER; note = 2'-O-methyl modified nucleoside
  modified_base 5: mod_base = OTHER; note = 2'-fluoro modified nucleoside
  modified_base 6: mod_base = OTHER; note = 2'-O-methyl modified nucleoside
  modified_base 7: mod_base = OTHER; note = 2'-fluoro modified nucleoside
  modified_base 8: mod_base = OTHER; note = 2'-O-methyl modified nucleoside
  modified_base 9: mod_base = OTHER; note = 2'-fluoro modified nucleoside
  modified_base 10: mod_base = OTHER; note = 2'-O-methyl modified nucleoside
  modified_base 11: mod_base = OTHER; note = 2'-fluoro modified nucleoside
  modified_base 12: mod_base = OTHER; note = 2'-O-methyl modified nucleoside
  modified_base 13: mod_base = OTHER; note = 2'-fluoro modified nucleoside
  modified_base 14: mod_base = OTHER; note = 2'-O-methyl modified nucleoside
  modified_base 15: mod_base = OTHER; note = 2'-O-methyl modified nucleoside
  modified_base 16: mod_base = OTHER; note = 2'-O-methyl modified nucleoside
  modified_base 17: mod_base = OTHER; note = 2'-fluoro modified nucleoside
  modified_base 18: mod_base = OTHER; note = 2'-O-methyl modified nucleoside
  modified_base 19: mod_base = OTHER; note = 2'-fluoro modified nucleoside with phosphorothioate linkage
  modified_base 20: mod_base = OTHER; note = 2'-O-methyl modified nucleoside with phosphorothioate linkage
  modified_base 21: mod_base = OTHER; note = 2'-O-methyl modified nucleoside
ctacaaaggtgaactcagatt

SEQ ID NO: 3240 - skipped

SEQ ID NO: 3241 - RNA, 21 nt, synthetic construct
  source 1..21: mol_type = other RNA
  misc_feature 1: note = ETL20 moiety
  modified_base 1: mod_base = OTHER; note = 2'-O-methyl modified nucleoside
  modified_base 2: mod_base = OTHER; note = 2'-O-methyl modified nucleoside
  modified_base 3: mod_base = OTHER; note = 2'-O-methyl modified nucleoside
  modified_base 4: mod_base = OTHER; note = 2'-O-methyl modified nucleoside
  modified_base 5: mod_base = OTHER; note = 2'-O-methyl modified nucleoside
  modified_base 6: mod_base = OTHER; note = 2'-fluoro modified nucleoside
  modified_base 7: mod_base = OTHER; note = 2'-fluoro modified nucleoside
  modified_base 8: mod_base = OTHER; note = 2'-fluoro modified nucleoside
  modified_base 9: mod_base = OTHER; note = 2'-fluoro modified nucleoside
  modified_base 10: mod_base = OTHER; note = 2'-fluoro modified nucleoside
  modified_base 11: mod_base = OTHER; note = 2'-O-methyl modified nucleoside
  modified_base 12: mod_base = OTHER; note = 2'-O-methyl modified nucleoside
  modified_base 13: mod_base = OTHER; note = 2'-O-methyl modified nucleoside
  modified_base 14: mod_base = OTHER; note = 2'-O-methyl modified nucleoside
  modified_base 15: mod_base = OTHER; note = 2'-O-methyl modified nucleoside
  modified_base 16: mod_base = OTHER; note = 2'-O-methyl modified nucleoside
  modified_base 17: mod_base = OTHER; note = 2'-O-methyl modified nucleoside
  modified_base 18: mod_base = OTHER; note = 2'-O-methyl modified nucleoside
  modified_base 19: mod_base = OTHER; note = 2'-O-methyl modified nucleoside with phosphorothioate linkage
  modified_base 20: mod_base = OTHER; note = 2'-O-methyl modified nucleoside with phosphorothioate linkage
  modified_base 21: mod_base = OTHER; note = 2'-O-methyl modified nucleoside
tctacaaaggtgaactcaatt

SEQ ID NO: 3242 - RNA, 21 nt, synthetic construct
  source 1..21: mol_type = other RNA
  misc_feature 1: note = ETL20 moiety
  modified_base 1: mod_base = OTHER; note = 2'-O-methyl modified nucleoside
  modified_base 2: mod_base = OTHER; note = 2'-O-methyl modified nucleoside
  modified_base 3: mod_base = OTHER; note = 2'-O-methyl modified nucleoside
  modified_base 4: mod_base = OTHER; note = 2'-O-methyl modified nucleoside
  modified_base 5: mod_base = OTHER; note = 2'-fluoro modified nucleoside
  modified_base 6: mod_base = OTHER; note = 2'-fluoro modified nucleoside
  modified_base 7: mod_base = OTHER; note = 2'-fluoro modified nucleoside
  modified_base 8: mod_base = OTHER; note = 2'-fluoro modified nucleoside
  modified_base 9: mod_base = OTHER; note = 2'-fluoro modified nucleoside
  modified_base 10: mod_base = OTHER; note = 2'-O-methyl modified nucleoside
  modified_base 11: mod_base = OTHER; note = 2'-O-methyl modified nucleoside
  modified_base 12: mod_base = OTHER; note = 2'-O-methyl modified nucleoside
  modified_base 13: mod_base = OTHER; note = 2'-O-methyl modified nucleoside
  modified_base 14: mod_base = OTHER; note = 2'-O-methyl modified nucleoside
  modified_base 15: mod_base = OTHER; note = 2'-O-methyl modified nucleoside
  modified_base 16: mod_base = OTHER; note = 2'-O-methyl modified nucleoside
  modified_base 17: mod_base = OTHER; note = 2'-O-methyl modified nucleoside
  modified_base 18: mod_base = OTHER; note = 2'-O-methyl modified nucleoside
  modified_base 19: mod_base = OTHER; note = 2'-O-methyl modified nucleoside with phosphorothioate linkage
  modified_base 20: mod_base = OTHER; note = 2'-O-methyl modified nucleoside with phosphorothioate linkage
  modified_base 21: mod_base = OTHER; note = 2'-O-methyl modified nucleoside
gaagaaaagcagaacggtatt

SEQ ID NO: 3243 - RNA, 21 nt, synthetic construct
  source 1..21: mol_type = other RNA
  misc_feature 1: note = 5VP moiety
  modified_base 1: mod_base = OTHER; note = 2'-O-methyl modified nucleoside with phosphorothioate linkage
  modified_base 2: mod_base = OTHER; note = 2'-fluoro modified nucleoside with phosphorothioate linkage
  modified_base 3: mod_base = OTHER; note = 2'-O-methyl modified nucleoside
  modified_base 4: mod_base = OTHER; note = 2'-O-methyl modified nucleoside
  modified_base 5: mod_base = OTHER; note = 2'-O-methyl modified nucleoside
  modified_base 6: mod_base = OTHER; note = 2'-fluoro modified nucleoside
  modified_base 7: mod_base = OTHER; note = 2'-O-methyl modified nucleoside
  modified_base 8: mod_base = OTHER; note = 2'-fluoro modified nucleoside
  modified_base 9: mod_base = OTHER; note = 2'-O-methyl modified nucleoside
  modified_base 10: mod_base = OTHER; note = 2'-O-methyl modified nucleoside
  modified_base 11: mod_base = OTHER; note = 2'-O-methyl modified nucleoside
  modified_base 12: mod_base = OTHER; note = 2'-O-methyl modified nucleoside
  modified_base 13: mod_base = OTHER; note = 2'-O-methyl modified nucleoside
  modified_base 14: mod_base = OTHER; note = 2'-fluoro modified nucleoside
  modified_base 15: mod_base = OTHER; note = 2'-O-methyl modified nucleoside
  modified_base 16: mod_base = OTHER; note = 2'-fluoro modified nucleoside
  modified_base 17: mod_base = OTHER; note = 2'-O-methyl modified nucleoside
  modified_base 18: mod_base = OTHER; note = 2'-O-methyl modified nucleoside
  modified_base 19: mod_base = OTHER; note = 2'-O-methyl modified nucleoside with phosphorothioate linkage
  modified_base 20: mod_base = OTHER; note = 2'-O-methyl modified nucleoside with phosphorothioate linkage
  modified_base 21: mod_base = OTHER; note = 2'-O-methyl modified nucleoside
tctgagttcacctttgtagtt

SEQ ID NO: 3244 - RNA, 21 nt, synthetic construct
  source 1..21: mol_type = other RNA
  misc_feature 1: note = 5VP moiety
  modified_base 1: mod_base = OTHER; note = 2'-O-methyl modified nucleoside with phosphorothioate linkage
  modified_base 2: mod_base = OTHER; note = 2'-fluoro modified nucleoside with phosphorothioate linkage
  modified_base 3: mod_base = OTHER; note = 2'-O-methyl modified nucleoside
  modified_base 4: mod_base = OTHER; note = 2'-fluoro modified nucleoside
  modified_base 5: mod_base = OTHER; note = 2'-O-methyl modified nucleoside
  modified_base 6: mod_base = OTHER; note = 2'-fluoro modified nucleoside
  modified_base 7: mod_base = OTHER; note = 2'-O-methyl modified nucleoside
  modified_base 8: mod_base = OTHER; note = 2'-fluoro modified nucleoside
  modified_base 9: mod_base = OTHER; note = 2'-O-methyl modified nucleoside
  modified_base 10: mod_base = OTHER; note = 2'-fluoro modified nucleoside
  modified_base 11: mod_base = OTHER; note = 2'-O-methyl modified nucleoside
  modified_base 12: mod_base = OTHER; note = 2'-fluoro modified nucleoside
  modified_base 13: mod_base = OTHER; note = 2'-O-methyl modified nucleoside
  modified_base 14: mod_base = OTHER; note = 2'-fluoro modified nucleoside
  modified_base 15: mod_base = OTHER; note = 2'-O-methyl modified nucleoside
  modified_base 16: mod_base = OTHER; note = 2'-fluoro modified nucleoside
  modified_base 17: mod_base = OTHER; note = 2'-O-methyl modified nucleoside
  modified_base 18: mod_base = OTHER; note = 2'-fluoro modified nucleoside
  modified_base 19: mod_base = OTHER; note = 2'-O-methyl modified nucleoside with phosphorothioate linkage
  modified_base 20: mod_base = OTHER; note = 2'-O-methyl modified nucleoside with phosphorothioate linkage
  modified_base 21: mod_base = OTHER; note = 2'-O-methyl modified nucleoside
ttgagttcacctttgtagatt

SEQ ID NO: 3245 - RNA, 21 nt, synthetic construct
  source 1..21: mol_type = other RNA
  misc_feature 1: note = 5VP moiety
  modified_base 1: mod_base = OTHER; note = 2'-O-methyl modified nucleoside with phosphorothioate linkage
  modified_base 2: mod_base = OTHER; note = 2'-fluoro modified nucleoside with phosphorothioate linkage
  modified_base 3: mod_base = OTHER; note = 2'-O-methyl modified nucleoside
  modified_base 4: mod_base = OTHER; note = 2'-fluoro modified nucleoside
  modified_base 5: mod_base = OTHER; note = 2'-O-methyl modified nucleoside
  modified_base 6: mod_base = OTHER; note = 2'-fluoro modified nucleoside
  modified_base 7: mod_base = OTHER; note = 2'-O-methyl modified nucleoside
  modified_base 8: mod_base = OTHER; note = 2'-fluoro modified nucleoside
  modified_base 9: mod_base = OTHER; note = 2'-O-methyl modified nucleoside
  modified_base 10: mod_base = OTHER; note = 2'-fluoro modified nucleoside
  modified_base 11: mod_base = OTHER; note = 2'-O-methyl modified nucleoside
  modified_base 12: mod_base = OTHER; note = 2'-fluoro modified nucleoside
  modified_base 13: mod_base = OTHER; note = 2'-O-methyl modified nucleoside
  modified_base 14: mod_base = OTHER; note = 2'-fluoro modified nucleoside
  modified_base 15: mod_base = OTHER; note = 2'-O-methyl modified nucleoside
  modified_base 16: mod_base = OTHER; note = 2'-fluoro modified nucleoside
  modified_base 17: mod_base = OTHER; note = 2'-O-methyl modified nucleoside
  modified_base 18: mod_base = OTHER; note = 2'-fluoro modified nucleoside
  modified_base 19: mod_base = OTHER; note = 2'-O-methyl modified nucleoside with phosphorothioate linkage
  modified_base 20: mod_base = OTHER; note = 2'-O-methyl modified nucleoside with phosphorothioate linkage
  modified_base 21: mod_base = OTHER; note = 2'-O-methyl modified nucleoside
taccgttctgcttttcttctt

SEQ ID NO: 3246 - RNA, 21 nt, synthetic construct
  source 1..21: mol_type = other RNA
  misc_feature 1: note = 5VP moiety
  modified_base 1: mod_base = OTHER; note = 2'-O-methyl modified nucleoside with phosphorothioate linkage
  modified_base 2: mod_base = OTHER; note = 2'-fluoro modified nucleoside with phosphorothioate linkage
  modified_base 3: mod_base = OTHER; note = 2'-O-methyl modified nucleoside
  modified_base 4: mod_base = OTHER; note = 2'-O-methyl modified nucleoside
  modified_base 5: mod_base = OTHER; note = 2'-O-methyl modified nucleoside
  modified_base 6: mod_base = OTHER; note = 2'-fluoro modified nucleoside
  modified_base 7: mod_base = OTHER; note = 2'-O-methyl modified nucleoside
  modified_base 8: mod_base = OTHER; note = 2'-fluoro modified nucleoside
  modified_base 9: mod_base = OTHER; note = 2'-O-methyl modified nucleoside
  modified_base 10: mod_base = OTHER; note = 2'-fluoro modified nucleoside
  modified_base 11: mod_base = OTHER; note = 2'-O-methyl modified nucleoside
  modified_base 12: mod_base = OTHER; note = 2'-fluoro modified nucleoside
  modified_base 13: mod_base = OTHER; note = 2'-O-methyl modified nucleoside
  modified_base 14: mod_base = OTHER; note = 2'-fluoro modified nucleoside
  modified_base 15: mod_base = OTHER; note = 2'-O-methyl modified nucleoside
  modified_base 16: mod_base = OTHER; note = 2'-fluoro modified nucleoside
  modified_base 17: mod_base = OTHER; note = 2'-O-methyl modified nucleoside
  modified_base 18: mod_base = OTHER; note = 2'-fluoro modified nucleoside
  modified_base 19: mod_base = OTHER; note = 2'-O-methyl modified nucleoside with phosphorothioate linkage
  modified_base 20: mod_base = OTHER; note = 2'-O-methyl modified nucleoside with phosphorothioate linkage
  modified_base 21: mod_base = OTHER; note = 2'-O-methyl modified nucleoside
ttgagttcacctttgtagatt

SEQ ID NO: 3247 - RNA, 21 nt, synthetic construct
  source 1..21: mol_type = other RNA
  misc_feature 1: note = 5VP moiety
  modified_base 1: mod_base = OTHER; note = 2'-O-methyl modified nucleoside with phosphorothioate linkage
  modified_base 2: mod_base = OTHER; note = 2'-fluoro modified nucleoside with phosphorothioate linkage
  modified_base 3: mod_base = OTHER; note = 2'-O-methyl modified nucleoside
  modified_base 4: mod_base = OTHER; note = 2'-O-methyl modified nucleoside
  modified_base 5: mod_base = OTHER; note = 2'-fluoro modified nucleoside
  modified_base 6: mod_base = OTHER; note = 2'-O-methyl modified nucleoside
  modified_base 7: mod_base = OTHER; note = 2'-fluoro modified nucleoside
  modified_base 8: mod_base = OTHER; note = 2'-O-methyl modified nucleoside
  modified_base 9: mod_base = OTHER; note = 2'-O-methyl modified nucleoside
  modified_base 10: mod_base = OTHER; note = 2'-fluoro modified nucleoside
  modified_base 11: mod_base = OTHER; note = 2'-O-methyl modified nucleoside
  modified_base 12: mod_base = OTHER; note = 2'-fluoro modified nucleoside
  modified_base 13: mod_base = OTHER; note = 2'-O-methyl modified nucleoside
  modified_base 14: mod_base = OTHER; note = 2'-fluoro modified nucleoside
  modified_base 15: mod_base = OTHER; note = 2'-O-methyl modified nucleoside
  modified_base 16: mod_base = OTHER; note = 2'-fluoro modified nucleoside
  modified_base 17: mod_base = OTHER; note = 2'-O-methyl modified nucleoside
  modified_base 18: mod_base = OTHER; note = 2'-fluoro modified nucleoside
  modified_base 19: mod_base = OTHER; note = 2'-O-methyl modified nucleoside with phosphorothioate linkage
  modified_base 20: mod_base = OTHER; note = 2'-O-methyl modified nucleoside with phosphorothioate linkage
  modified_base 21: mod_base = OTHER; note = 2'-O-methyl modified nucleoside
ttgagttcacctttgtagatt

SEQ ID NO: 3248 - RNA, 21 nt, synthetic construct
  source 1..21: mol_type = other RNA
  misc_feature 1: note = 5VP moiety
  modified_base 1: mod_base = OTHER; note = 2'-O-methyl modified nucleoside with phosphorothioate linkage
  modified_base 2: mod_base = OTHER; note = 2'-fluoro modified nucleoside with phosphorothioate linkage
  modified_base 3: mod_base = OTHER; note = 2'-O-methyl modified nucleoside
  modified_base 4: mod_base = OTHER; note = 2'-O-methyl modified nucleoside
  modified_base 5: mod_base = OTHER; note = 2'-O-methyl modified nucleoside
  modified_base 6: mod_base = OTHER; note = 2'-fluoro modified nucleoside
  modified_base 7: mod_base = OTHER; note = 2'-O-methyl modified nucleoside
  modified_base 8: mod_base = OTHER; note = 2'-fluoro modified nucleoside
  modified_base 9: mod_base = OTHER; note = 2'-O-methyl modified nucleoside
  modified_base 10: mod_base = OTHER; note = 2'-fluoro modified nucleoside
  modified_base 11: mod_base = OTHER; note = 2'-O-methyl modified nucleoside
  modified_base 12: mod_base = OTHER; note = 2'-fluoro modified nucleoside
  modified_base 13: mod_base = OTHER; note = 2'-O-methyl modified nucleoside
  modified_base 14: mod_base = OTHER; note = 2'-fluoro modified nucleoside
  modified_base 15: mod_base = OTHER; note = 2'-O-methyl modified nucleoside
  modified_base 16: mod_base = OTHER; note = 2'-fluoro modified nucleoside
  modified_base 17: mod_base = OTHER; note = 2'-O-methyl modified nucleoside
  modified_base 18: mod_base = OTHER; note = 2'-fluoro modified nucleoside
  modified_base 19: mod_base = OTHER; note = 2'-O-methyl modified nucleoside with phosphorothioate linkage
  modified_base 20: mod_base = OTHER; note = 2'-O-methyl modified nucleoside with phosphorothioate linkage
  modified_base 21: mod_base = OTHER; note = 2'-O-methyl modified nucleoside
taccgttctgcttttcttctt

SEQ ID NO: 3249 - RNA, 21 nt, synthetic construct
  source 1..21: mol_type = other RNA
  misc_feature 1: note = 5VP moiety
  modified_base 1: mod_base = OTHER; note = 2'-O-methyl modified nucleoside with phosphorothioate linkage
  modified_base 2: mod_base = OTHER; note = 2'-fluoro modified nucleoside with phosphorothioate linkage
  modified_base 3: mod_base = OTHER; note = 2'-O-methyl modified nucleoside
  modified_base 4: mod_base = OTHER; note = 2'-fluoro modified nucleoside
  modified_base 5: mod_base = OTHER; note = 2'-O-methyl modified nucleoside
  modified_base 6: mod_base = OTHER; note = 2'-O-methyl modified nucleoside
  modified_base 7: mod_base = OTHER; note = 2'-fluoro modified nucleoside
  modified_base 8: mod_base = OTHER; note = 2'-O-methyl modified nucleoside
  modified_base 9: mod_base = OTHER; note = 2'-fluoro modified nucleoside
  modified_base 10: mod_base = OTHER; note = 2'-O-methyl modified nucleoside
  modified_base 11: mod_base = OTHER; note = 2'-O-methyl modified nucleoside
  modified_base 12: mod_base = OTHER; note = 2'-O-methyl modified nucleoside
  modified_base 13: mod_base = OTHER; note = 2'-O-methyl modified nucleoside
  modified_base 14: mod_base = OTHER; note = 2'-fluoro modified nucleoside
  modified_base 15: mod_base = OTHER; note = 2'-O-methyl modified nucleoside
  modified_base 16: mod_base = OTHER; note = 2'-fluoro modified nucleoside
  modified_base 17: mod_base = OTHER; note = 2'-O-methyl modified nucleoside
  modified_base 18: mod_base = OTHER; note = 2'-fluoro modified nucleoside
  modified_base 19: mod_base = OTHER; note = 2'-O-methyl modified nucleoside with phosphorothioate linkage
  modified_base 20: mod_base = OTHER; note = 2'-O-methyl modified nucleoside with phosphorothioate linkage
  modified_base 21: mod_base = OTHER; note = 2'-O-methyl modified nucleoside
ttgagttcacctttgtagatt

SEQ ID NO: 3250 - RNA, 21 nt, synthetic construct
  source 1..21: mol_type = other RNA
  misc_feature 1: note = 5VP moiety
  modified_base 1: mod_base = OTHER; note = 2'-O-methyl modified nucleoside with phosphorothioate linkage
  modified_base 2: mod_base = OTHER; note = 2'-fluoro modified nucleoside with phosphorothioate linkage
  modified_base 3: mod_base = OTHER; note = 2'-O-methyl modified nucleoside
  modified_base 4: mod_base = OTHER; note = 2'-O-methyl modified nucleoside
  modified_base 5: mod_base = OTHER; note = 2'-fluoro modified nucleoside
  modified_base 6: mod_base = OTHER; note = 2'-O-methyl modified nucleoside
  modified_base 7: mod_base = OTHER; note = 2'-fluoro modified nucleoside
  modified_base 8: mod_base = OTHER; note = 2'-O-methyl modified nucleoside
  modified_base 9: mod_base = OTHER; note = 2'-O-methyl modified nucleoside
  modified_base 10: mod_base = OTHER; note = 2'-fluoro modified nucleoside
  modified_base 11: mod_base = OTHER; note = 2'-O-methyl modified nucleoside
  modified_base 12: mod_base = OTHER; note = 2'-fluoro modified nucleoside
  modified_base 13: mod_base = OTHER; note = 2'-O-methyl modified nucleoside
  modified_base 14: mod_base = OTHER; note = 2'-fluoro modified nucleoside
  modified_base 15: mod_base = OTHER; note = 2'-O-methyl modified nucleoside
  modified_base 16: mod_base = OTHER; note = 2'-fluoro modified nucleoside
  modified_base 17: mod_base = OTHER; note = 2'-O-methyl modified nucleoside
  modified_base 18: mod_base = OTHER; note = 2'-fluoro modified nucleoside
  modified_base 19: mod_base = OTHER; note = 2'-O-methyl modified nucleoside with phosphorothioate linkage
  modified_base 20: mod_base = OTHER; note = 2'-O-methyl modified nucleoside with phosphorothioate linkage
  modified_base 21: mod_base = OTHER; note = 2'-O-methyl modified nucleoside
taccgttctgcttttcttctt

SEQ ID NO: 3251 - RNA, 21 nt, synthetic construct
  source 1..21: mol_type = other RNA
  misc_feature 1: note = ETL20 moiety with phosphorothioate linkage
  modified_base 1: mod_base = OTHER; note = 2'-O-methyl modified nucleoside with phosphorothioate linkage
  modified_base 2: mod_base = OTHER; note = 2'-O-methyl modified nucleoside
  modified_base 3: mod_base = OTHER; note = 2'-O-methyl modified nucleoside
  modified_base 4: mod_base = OTHER; note = 2'-O-methyl modified nucleoside
  modified_base 5: mod_base = OTHER; note = 2'-O-methyl modified nucleoside
  modified_base 6: mod_base = OTHER; note = 2'-O-methyl modified nucleoside
  modified_base 7: mod_base = OTHER; note = 2'-fluoro modified nucleoside
  modified_base 8: mod_base = OTHER; note = 2'-O-methyl modified nucleoside
  modified_base 9: mod_base = OTHER; note = 2'-fluoro modified nucleoside
  modified_base 10: mod_base = OTHER; note = 2'-fluoro modified nucleoside
  modified_base 11: mod_base = OTHER; note = 2'-fluoro modified nucleoside
  modified_base 12: mod_base = OTHER; note = 2'-O-methyl modified nucleoside
  modified_base 13: mod_base = OTHER; note = 2'-O-methyl modified nucleoside
  modified_base 14: mod_base = OTHER; note = 2'-O-methyl modified nucleoside
  modified_base 15: mod_base = OTHER; note = 2'-O-methyl modified nucleoside
  modified_base 16: mod_base = OTHER; note = 2'-O-methyl modified nucleoside
  modified_base 17: mod_base = OTHER; note = 2'-O-methyl modified nucleoside
  modified_base 18: mod_base = OTHER; note = 2'-O-methyl modified nucleoside
  modified_base 19: mod_base = OTHER; note = 2'-O-methyl modified nucleoside with phosphorothioate linkage
  modified_base 20: mod_base = OTHER; note = 2'-O-methyl modified nucleoside with phosphorothioate linkage
  modified_base 21: mod_base = OTHER; note = 2'-O-methyl modified nucleoside
cattttaatcctcactctaaa

SEQ ID NO: 3252 - RNA, 23 nt, synthetic construct
  source 1..23: mol_type = other RNA
  misc_feature 1: note = 5VP moiety
  modified_base 1: mod_base = OTHER; note = 2'-O-methyl modified nucleoside with phosphorothioate linkage
  modified_base 2: mod_base = OTHER; note = 2'-fluoro modified nucleoside with phosphorothioate linkage
  modified_base 3: mod_base = OTHER; note = 2'-O-methyl modified nucleoside
  modified_base 4: mod_base = OTHER; note = 2'-O-methyl modified nucleoside
  modified_base 5: mod_base = OTHER; note = 2'-O-methyl modified nucleoside
  modified_base 6: mod_base = OTHER; note = 2'-fluoro modified nucleoside
  modified_base 7: mod_base = OTHER; note = 2'-O-methyl modified nucleoside
  modified_base 8: mod_base = OTHER; note = 2'-fluoro modified nucleoside
  modified_base 9: mod_base = OTHER; note = 2'-fluoro modified nucleoside
  modified_base 10: mod_base = OTHER; note = 2'-O-methyl modified nucleoside
  modified_base 11: mod_base = OTHER; note = 2'-O-methyl modified nucleoside
  modified_base 12: mod_base = OTHER; note = 2'-O-methyl modified nucleoside
  modified_base 13: mod_base = OTHER; note = 2'-O-methyl modified nucleoside
  modified_base 14: mod_base = OTHER; note = 2'-fluoro modified nucleoside
  modified_base 15: mod_base = OTHER; note = 2'-O-methyl modified nucleoside
  modified_base 16: mod_base = OTHER; note = 2'-fluoro modified nucleoside
  modified_base 17: mod_base = OTHER; note = 2'-O-methyl modified nucleoside
  modified_base 18: mod_base = OTHER; note = 2'-O-methyl modified nucleoside
  modified_base 19: mod_base = OTHER; note = 2'-O-methyl modified nucleoside
  modified_base 20: mod_base = OTHER; note = 2'-O-methyl modified nucleoside
  modified_base 21: mod_base = OTHER; note = 2'-O-methyl modified nucleoside with phosphorothioate linkage
  modified_base 22: mod_base = OTHER; note = 2'-O-methyl modified nucleoside with phosphorothioate linkage
  modified_base 23: mod_base = OTHER; note = 2'-O-methyl modified nucleoside
tttagagtgaggattaaaatgag

SEQ ID NO: 3253 - RNA, 21 nt, synthetic construct
  source 1..21: mol_type = other RNA
cattttaatcctcactctaaa

SEQ ID NO: 3254 - RNA, 23 nt, synthetic construct
  source 1..23: mol_type = other RNA
tttagagtgaggattaaaatgag

SEQ ID NO: 3255-3258 - skipped (4 entries)

SEQ ID NO: 3259 - RNA, 21 nt, synthetic construct
  source 1..21: mol_type = other RNA
  misc_feature 1: note = ETL17 moiety with phosphorothioate linkage
  modified_base 1: mod_base = OTHER; note = 2'-O-methyl modified nucleoside
  modified_base 2: mod_base = OTHER; note = 2'-O-methyl modified nucleoside
  modified_base 3: mod_base = OTHER; note = 2'-O-methyl modified nucleoside
  modified_base 4: mod_base = OTHER; note = 2'-O-methyl modified nucleoside
  modified_base 5: mod_base = OTHER; note = 2'-fluoro modified nucleoside
  modified_base 6: mod_base = OTHER; note = 2'-fluoro modified nucleoside
  modified_base 7: mod_base = OTHER; note = 2'-fluoro modified nucleoside
  modified_base 8: mod_base = OTHER; note = 2'-fluoro modified nucleoside
  modified_base 9: mod_base = OTHER; note = 2'-fluoro modified nucleoside
  modified_base 10: mod_base = OTHER; note = 2'-O-methyl modified nucleoside
  modified_base 11: mod_base = OTHER; note = 2'-O-methyl modified nucleoside
  modified_base 12: mod_base = OTHER; note = 2'-O-methyl modified nucleoside
  modified_base 13: mod_base = OTHER; note = 2'-O-methyl modified nucleoside
  modified_base 14: mod_base = OTHER; note = 2'-O-methyl modified nucleoside
  modified_base 15: mod_base = OTHER; note = 2'-O-methyl modified nucleoside
  modified_base 16: mod_base = OTHER; note = 2'-O-methyl modified nucleoside
  modified_base 17: mod_base = OTHER; note = 2'-O-methyl modified nucleoside
  modified_base 18: mod_base = OTHER; note = 2'-O-methyl modified nucleoside
  modified_base 19: mod_base = OTHER; note = 2'-O-methyl modified nucleoside with phosphorothioate linkage
  modified_base 20: mod_base = OTHER; note = 2'-O-methyl modified nucleoside with phosphorothioate linkage
  modified_base 21: mod_base = OTHER; note = 2'-O-methyl modified nucleoside
gaagaaaagcagaacggtatt

SEQ ID NO: 3260 - RNA, 21 nt, synthetic construct
  source 1..21: mol_type = other RNA
  misc_feature 1: note = ETL17 moiety with phosphorothioate linkage
  modified_base 1: mod_base = OTHER; note = 2'-O-methyl modified nucleoside
  modified_base 2: mod_base = OTHER; note = 2'-O-methyl modified nucleoside
  modified_base 3: mod_base = OTHER; note = 2'-O-methyl modified nucleoside
  modified_base 4: mod_base = OTHER; note = 2'-O-methyl modified nucleoside
  modified_base 5: mod_base = OTHER; note = 2'-O-methyl modified nucleoside
  modified_base 6: mod_base = OTHER; note = 2'-fluoro modified nucleoside
  modified_base 7: mod_base = OTHER; note = 2'-fluoro modified nucleoside
  modified_base 8: mod_base = OTHER; note = 2'-fluoro modified nucleoside
  modified_base 9: mod_base = OTHER; note = 2'-fluoro modified nucleoside
  modified_base 10: mod_base = OTHER; note = 2'-O-methyl modified nucleoside
  modified_base 11: mod_base = OTHER; note = 2'-O-methyl modified nucleoside
  modified_base 12: mod_base = OTHER; note = 2'-O-methyl modified nucleoside
  modified_base 13: mod_base = OTHER; note = 2'-O-methyl modified nucleoside
  modified_base 14: mod_base = OTHER; note = 2'-O-methyl modified nucleoside
  modified_base 15: mod_base = OTHER; note = 2'-O-methyl modified nucleoside
  modified_base 16: mod_base = OTHER; note = 2'-O-methyl modified nucleoside
  modified_base 17: mod_base = OTHER; note = 2'-O-methyl modified nucleoside
  modified_base 18: mod_base = OTHER; note = 2'-O-methyl modified nucleoside
  modified_base 19: mod_base = OTHER; note = 2'-O-methyl modified nucleoside with phosphorothioate linkage
  modified_base 20: mod_base = OTHER; note = 2'-O-methyl modified nucleoside with phosphorothioate linkage
  modified_base 21: mod_base = OTHER; note = 2'-O-methyl modified nucleoside
aagaaaagcagaacggtgatt

SEQ ID NO: 3261 - RNA, 21 nt, synthetic construct
  source 1..21: mol_type = other RNA
  modified_base 1: mod_base = OTHER; note = 2'-O-methyl modified nucleoside with phosphorothioate linkage
  modified_base 2: mod_base = OTHER; note = 2'-fluoro modified nucleoside with phosphorothioate linkage
  modified_base 3: mod_base = OTHER; note = 2'-O-methyl modified nucleoside
  modified_base 4: mod_base = OTHER; note = 2'-O-methyl modified nucleoside
  modified_base 5: mod_base = OTHER; note = 2'-fluoro modified nucleoside
  modified_base 6: mod_base = OTHER; note = 2'-O-methyl modified nucleoside
  modified_base 7: mod_base = OTHER; note = 2'-fluoro modified nucleoside
  modified_base 8: mod_base = OTHER; note = 2'-O-methyl modified nucleoside
  modified_base 9: mod_base = OTHER; note = 2'-O-methyl modified nucleoside
  modified_base 10: mod_base = OTHER; note = 2'-fluoro modified nucleoside
  modified_base 11: mod_base = OTHER; note = 2'-O-methyl modified nucleoside
  modified_base 12: mod_base = OTHER; note = 2'-fluoro modified nucleoside
  modified_base 13: mod_base = OTHER; note = 2'-O-methyl modified nucleoside
  modified_base 14: mod_base = OTHER; note = 2'-fluoro modified nucleoside
  modified_base 15: mod_base = OTHER; note = 2'-O-methyl modified nucleoside
  modified_base 16: mod_base = OTHER; note = 2'-fluoro modified nucleoside
  modified_base 17: mod_base = OTHER; note = 2'-O-methyl modified nucleoside
  modified_base 18: mod_base = OTHER; note = 2'-fluoro modified nucleoside
  modified_base 19: mod_base = OTHER; note = 2'-O-methyl modified nucleoside with phosphorothioate linkage
  modified_base 20: mod_base = OTHER; note = 2'-O-methyl modified nucleoside with phosphorothioate linkage
  modified_base 21: mod_base = OTHER; note = 2'-O-methyl modified nucleoside
taccgttctgcttttcttctt

SEQ ID NO: 3262 - RNA, 21 nt, synthetic construct
  source 1..21: mol_type = other RNA
  modified_base 1: mod_base = OTHER; note = 2'-O-methyl modified nucleoside with phosphorothioate linkage
  modified_base 2: mod_base = OTHER; note = 2'-fluoro modified nucleoside with phosphorothioate linkage
  modified_base 3: mod_base = OTHER; note = 2'-O-methyl modified nucleoside
  modified_base 4: mod_base = OTHER; note = 2'-fluoro modified nucleoside
  modified_base 5: mod_base = OTHER; note = 2'-O-methyl modified nucleoside
  modified_base 6: mod_base = OTHER; note = 2'-fluoro modified nucleoside
  modified_base 7: mod_base = OTHER; note = 2'-O-methyl modified nucleoside
  modified_base 8: mod_base = OTHER; note = 2'-fluoro modified nucleoside
  modified_base 9: mod_base = OTHER; note = 2'-O-methyl modified nucleoside
  modified_base 10: mod_base = OTHER; note = 2'-fluoro modified nucleoside
  modified_base 11: mod_base = OTHER; note = 2'-O-methyl modified nucleoside
  modified_base 12: mod_base = OTHER; note = 2'-fluoro modified nucleoside
  modified_base 13: mod_base = OTHER; note = 2'-O-methyl modified nucleoside
  modified_base 14: mod_base = OTHER; note = 2'-fluoro modified nucleoside
  modified_base 15: mod_base = OTHER; note = 2'-O-methyl modified nucleoside
  modified_base 16: mod_base = OTHER; note = 2'-fluoro modified nucleoside
  modified_base 17: mod_base = OTHER; note = 2'-O-methyl modified nucleoside
  modified_base 18: mod_base = OTHER; note = 2'-fluoro modified nucleoside
  modified_base 19: mod_base = OTHER; note = 2'-O-methyl modified nucleoside with phosphorothioate linkage
  modified_base 20: mod_base = OTHER; note = 2'-O-methyl modified nucleoside with phosphorothioate linkage
  modified_base 21: mod_base = OTHER; note = 2'-O-methyl modified nucleoside
tcaccgttctgcttttctttt

SEQ ID NO: 3263 - RNA, 21 nt, synthetic construct
  source 1..21: mol_type = other RNA
aagaaaagcagaacggtgatt

SEQ ID NO: 3264 - RNA, 19 nt, synthetic construct
  source 1..19: mol_type = other RNA
aagaaaagcagaacggtga

SEQ ID NO: 3265 - RNA, 21 nt, synthetic construct
  source 1..21: mol_type = other RNA
tcaccgttctgcttttctttt

SEQ ID NO: 3266 - RNA, 19 nt, synthetic construct
  source 1..19: mol_type = other RNA
tcaccgttctgcttttctt

SEQ ID NO: 3267 - RNA, 21 nt, synthetic construct
  source 1..21: mol_type = other RNA
  misc_feature 1: note = ETL17 moiety with phosphorothioate linkage
  modified_base 1: mod_base = OTHER; note = 2'-O-methyl modified nucleoside
  modified_base 2: mod_base = OTHER; note = 2'-O-methyl modified nucleoside
  modified_base 3: mod_base = OTHER; note = 2'-O-methyl modified nucleoside
  modified_base 4: mod_base = OTHER; note = 2'-O-methyl modified nucleoside
  modified_base 5: mod_base = OTHER; note = 2'-O-methyl modified nucleoside
  modified_base 6: mod_base = OTHER; note = 2'-fluoro modified nucleoside
  modified_base 7: mod_base = OTHER; note = 2'-fluoro modified nucleoside
  modified_base 8: mod_base = OTHER; note = 2'-fluoro modified nucleoside
  modified_base 9: mod_base = OTHER; note = 2'-fluoro modified nucleoside
  modified_base 10: mod_base = OTHER; note = 2'-O-methyl modified nucleoside
  modified_base 11: mod_base = OTHER; note = 2'-O-methyl modified nucleoside
  modified_base 12: mod_base = OTHER; note = 2'-O-methyl modified nucleoside
  modified_base 13: mod_base = OTHER; note = 2'-O-methyl modified nucleoside
  modified_base 14: mod_base = OTHER; note = 2'-O-methyl modified nucleoside
  modified_base 15: mod_base = OTHER; note = 2'-O-methyl modified nucleoside
  modified_base 16: mod_base = OTHER; note = 2'-O-methyl modified nucleoside
  modified_base 17: mod_base = OTHER; note = 2'-O-methyl modified nucleoside
  modified_base 18: mod_base = OTHER; note = 2'-O-methyl modified nucleoside
  modified_base 19: mod_base = OTHER; note = 2'-O-methyl modified nucleoside with phosphorothioate linkage
  modified_base 20: mod_base = OTHER; note = 2'-O-methyl modified nucleoside with phosphorothioate linkage
  modified_base 21: mod_base = OTHER; note = 2'-O-methyl modified nucleoside
aagaaaagcagaacggtgatt

SEQ ID NO: 3268 - RNA, 21 nt, synthetic construct
  source 1..21: mol_type = other RNA
  misc_feature 1: note = ETL17 moiety with phosphorothioate linkage
  modified_base 1: mod_base = OTHER; note = 2'-O-methyl modified nucleoside
  modified_base 2: mod_base = OTHER; note = 2'-O-methyl modified nucleoside
  modified_base 3: mod_base = OTHER; note = 2'-O-methyl modified nucleoside
  modified_base 4: mod_base = OTHER; note = 2'-methoxy ethyl modified nucleoside
  modified_base 5: mod_base = OTHER; note = 2'-O-methyl modified nucleoside
  modified_base 6: mod_base = OTHER; note = 2'-fluoro modified nucleoside
  modified_base 7: mod_base = OTHER; note = 2'-fluoro modified nucleoside
  modified_base 8: mod_base = OTHER; note = 2'-fluoro modified nucleoside
  modified_base 9: mod_base = OTHER; note = 2'-fluoro modified nucleoside
  modified_base 10: mod_base = OTHER; note = 2'-O-methyl modified nucleoside
  modified_base 11: mod_base = OTHER; note = 2'-O-methyl modified nucleoside
  modified_base 12: mod_base = OTHER; note = 2'-O-methyl modified nucleoside
  modified_base 13: mod_base = OTHER; note = 2'-O-methyl modified nucleoside
  modified_base 14: mod_base = OTHER; note = 2'-O-methyl modified nucleoside
  modified_base 15: mod_base = OTHER; note = 2'-methoxy ethyl modified nucleoside
  modified_base 16: mod_base = OTHER; note = 2'-O-methyl modified nucleoside
  modified_base 17: mod_base = OTHER; note = 2'-O-methyl modified nucleoside
  modified_base 18: mod_base = OTHER; note = 2'-O-methyl modified nucleoside
  modified_base 19: mod_base = OTHER; note = 2'-O-methyl modified nucleoside with phosphorothioate linkage
  modified_base 20: mod_base = OTHER; note = 2'-O-methyl modified nucleoside with phosphorothioate linkage
  modified_base 21: mod_base = OTHER; note = 2'-O-methyl modified nucleoside
aagaaaagcagaacggtgatt

SEQ ID NO: 3269 - RNA, 21 nt, synthetic construct
  source 1..21: mol_type = other RNA
  misc_feature 1: note = ETL17 moiety with phosphorothioate linkage
  modified_base 1: mod_base = OTHER; note = 2'-O-methyl modified nucleoside
  modified_base 2: mod_base = OTHER; note = 2'-O-methyl modified nucleoside
  modified_base 3: mod_base = OTHER; note = 2'-O-methyl modified nucleoside
  modified_base 4: mod_base = OTHER; note = 2'-methoxy ethyl modified nucleoside
  modified_base 5: mod_base = OTHER; note = 2'-O-methyl modified nucleoside
  modified_base 6: mod_base = OTHER; note = 2'-fluoro modified nucleoside
  modified_base 7: mod_base = OTHER; note = 2'-fluoro modified nucleoside
  modified_base 8: mod_base = OTHER; note = 2'-fluoro modified nucleoside
  modified_base 9: mod_base = OTHER; note = 2'-fluoro modified nucleoside
  modified_base 10: mod_base = OTHER; note = 2'-O-methyl modified nucleoside
  modified_base 11: mod_base = OTHER; note = 2'-O-methyl modified nucleoside
  modified_base 12: mod_base = OTHER; note = 2'-O-methyl modified nucleoside
  modified_base 13: mod_base = OTHER; note = 2'-O-methyl modified nucleoside
  modified_base 14: mod_base = OTHER; note = 2'-methoxy ethyl modified nucleoside
  modified_base 15: mod_base = OTHER; note = 2'-O-methyl modified nucleoside
  modified_base 16: mod_base = OTHER; note = 2'-O-methyl modified nucleoside
  modified_base 17: mod_base = OTHER; note = 2'-O-methyl modified nucleoside
  modified_base 18: mod_base = OTHER; note = 2'-O-methyl modified nucleoside
  modified_base 19: mod_base = OTHER; note = 2'-O-methyl modified nucleoside with phosphorothioate linkage
  modified_base 20: mod_base = OTHER; note = 2'-O-methyl modified nucleoside with phosphorothioate linkage
  modified_base 21: mod_base = OTHER; note = 2'-O-methyl modified nucleoside
aagaaaagcagaacggtgatt

SEQ ID NO: 3270 - RNA, 21 nt, synthetic construct
  source 1..21: mol_type = other RNA
  misc_feature 1: note = ETL17 moiety with phosphorothioate linkage
  modified_base 1: mod_base = OTHER; note = 2'-O-methyl modified nucleoside
  modified_base 2: mod_base = OTHER; note = 2'-O-methyl modified nucleoside
  modified_base 3: mod_base = OTHER; note = 2'-O-methyl modified nucleoside
  modified_base 4: mod_base = OTHER; note = 2'-methoxy ethyl modified nucleoside
  modified_base 5: mod_base = OTHER; note = 2'-O-methyl modified nucleoside
  modified_base 6: mod_base = OTHER; note = 2'-fluoro modified nucleoside
  modified_base 7: mod_base = OTHER; note = 2'-fluoro modified nucleoside
  modified_base 8: mod_base = OTHER; note = 2'-fluoro modified nucleoside
  modified_base 9: mod_base = OTHER; note = 2'-fluoro modified nucleoside
  modified_base 10: mod_base = OTHER; note = 2'-O-methyl modified nucleoside
  modified_base 11: mod_base = OTHER; note = 2'-O-methyl modified nucleoside
  modified_base 12: mod_base = OTHER; note = 2'-O-methyl modified nucleoside
  modified_base 13: mod_base = OTHER; note = 2'-methoxy ethyl modified nucleoside
  modified_base 14: mod_base = OTHER; note = 2'-O-methyl modified nucleoside
  modified_base 15: mod_base = OTHER; note = 2'-O-methyl modified nucleoside
  modified_base 16: mod_base = OTHER; note = 2'-O-methyl modified nucleoside
  modified_base 17: mod_base = OTHER; note = 2'-O-methyl modified nucleoside
  modified_base 18: mod_base = OTHER; note = 2'-O-methyl modified nucleoside
  modified_base 19: mod_base = OTHER; note = 2'-O-methyl modified nucleoside with phosphorothioate linkage
  modified_base 20: mod_base = OTHER; note = 2'-O-methyl modified nucleoside with phosphorothioate linkage
  modified_base 21: mod_base = OTHER; note = 2'-O-methyl modified nucleoside
aagaaaagcagaacggtgatt

SEQ ID NO: 3271 - RNA, 21 nt, synthetic construct
  source 1..21: mol_type = other RNA
  misc_feature 1: note = ETL17 moiety with phosphorothioate linkage
  modified_base 1: mod_base = OTHER; note = 2'-O-methyl modified nucleoside
  modified_base 2: mod_base = OTHER; note = 2'-O-methyl modified nucleoside
  modified_base 3: mod_base = OTHER; note = 2'-O-methyl modified nucleoside
  modified_base 4: mod_base = OTHER; note = 2'-methoxy ethyl modified nucleoside
  modified_base 5: mod_base = OTHER; note = 2'-O-methyl modified nucleoside
  modified_base 6: mod_base = OTHER; note = 2'-fluoro modified nucleoside
  modified_base 7: mod_base = OTHER; note = 2'-fluoro modified nucleoside
  modified_base 8: mod_base = OTHER; note = 2'-fluoro modified nucleoside
  modified_base 9: mod_base = OTHER; note = 2'-fluoro modified nucleoside
  modified_base 10: mod_base = OTHER; note = 2'-O-methyl modified nucleoside
  modified_base 11: mod_base = OTHER; note = 2'-O-methyl modified nucleoside
  modified_base 12: mod_base = OTHER; note = 2'-methoxy ethyl modified nucleoside
  modified_base 13: mod_base = OTHER; note = 2'-O-methyl modified nucleoside
  modified_base 14: mod_base = OTHER; note = 2'-O-methyl modified nucleoside
  modified_base 15: mod_base = OTHER; note = 2'-O-methyl modified nucleoside
  modified_base 16: mod_base = OTHER; note = 2'-O-methyl modified nucleoside
  modified_base 17: mod_base = OTHER; note = 2'-O-methyl modified nucleoside
  modified_base 18: mod_base = OTHER; note = 2'-O-methyl modified nucleoside
  modified_base 19: mod_base = OTHER; note = 2'-O-methyl modified nucleoside with phosphorothioate linkage
  modified_base 20: mod_base = OTHER; note = 2'-O-methyl modified nucleoside with phosphorothioate linkage
  modified_base 21: mod_base = OTHER; note = 2'-O-methyl modified nucleoside
aagaaaagcagaacggtgatt

SEQ ID NO: 3272 - RNA, 21 nt, synthetic construct
  source 1..21: mol_type = other RNA
  misc_feature 1: note = ETL17 moiety with phosphorothioate linkage
  modified_base 1: mod_base = OTHER; note = 2'-O-methyl modified nucleoside
  modified_base 2: mod_base = OTHER; note = 2'-O-methyl modified nucleoside
  modified_base 3: mod_base = OTHER; note = 2'-O-methyl modified nucleoside
  modified_base 4: mod_base = OTHER; note = 2'-O-methyl modified nucleoside
  modified_base 5: mod_base = OTHER; note = 2'-methoxy ethyl modified nucleoside
  modified_base 6: mod_base = OTHER; note = 2'-fluoro modified nucleoside
  modified_base 7: mod_base = OTHER; note = 2'-fluoro modified nucleoside
  modified_base 8: mod_base = OTHER; note = 2'-fluoro modified nucleoside
  modified_base 9: mod_base = OTHER; note = 2'-fluoro modified nucleoside
  modified_base 10: mod_base = OTHER; note = 2'-O-methyl modified nucleoside
  modified_base 11: mod_base = OTHER; note = 2'-O-methyl modified nucleoside
  modified_base 12: mod_base = OTHER; note = 2'-methoxy ethyl modified nucleoside
  modified_base 13: mod_base = OTHER; note = 2'-O-methyl modified nucleoside
  modified_base 14: mod_base = OTHER; note = 2'-O-methyl modified nucleoside
  modified_base 15: mod_base = OTHER; note = 2'-O-methyl modified nucleoside
  modified_base 16: mod_base = OTHER; note = 2'-O-methyl modified nucleoside
  modified_base 17: mod_base = OTHER; note = 2'-O-methyl modified nucleoside
  modified_base 18: mod_base = OTHER; note = 2'-O-methyl modified nucleoside
  modified_base 19: mod_base = OTHER; note = 2'-O-methyl modified nucleoside with phosphorothioate linkage
  modified_base 20: mod_base = OTHER; note = 2'-O-methyl modified nucleoside with phosphorothioate linkage
  modified_base 21: mod_base = OTHER; note = 2'-O-methyl modified nucleoside
aagaaaagcagaacggtgatt

SEQ ID NO: 3273 - RNA, 21 nt, synthetic construct
  source 1..21: mol_type = other RNA
  misc_feature 1: note = ETL17 moiety with phosphorothioate linkage
  modified_base 1: mod_base = OTHER; note = 2'-O-methyl modified nucleoside
  modified_base 2: mod_base = OTHER; note = 2'-O-methyl modified nucleoside
  modified_base 3: mod_base = OTHER; note = 2'-O-methyl modified nucleoside
  modified_base 4: mod_base = OTHER; note = 2'-O-methyl modified nucleoside
  modified_base 5: mod_base = OTHER; note = 2'-methoxy ethyl modified nucleoside
  modified_base 6: mod_base = OTHER; note = 2'-fluoro modified nucleoside
  modified_base 7: mod_base = OTHER; note = 2'-fluoro modified nucleoside
  modified_base 8: mod_base = OTHER; note = 2'-fluoro modified nucleoside
  modified_base 9: mod_base = OTHER; note = 2'-fluoro modified nucleoside
  modified_base 10: mod_base = OTHER; note = 2'-O-methyl modified nucleoside
  modified_base 11: mod_base = OTHER; note = 2'-O-methyl modified nucleoside
  modified_base 12: mod_base = OTHER; note = 2'-O-methyl modified nucleoside
  modified_base 13: mod_base = OTHER; note = 2'-methoxy ethyl modified nucleoside
  modified_base 14: mod_base = OTHER; note = 2'-O-methyl modified nucleoside
  modified_base 15: mod_base = OTHER; note = 2'-O-methyl modified nucleoside
  modified_base 16: mod_base = OTHER; note = 2'-O-methyl modified nucleoside
  modified_base 17: mod_base = OTHER; note = 2'-O-methyl modified nucleoside
  modified_base 18: mod_base = OTHER; note = 2'-O-methyl modified nucleoside
  modified_base 19: mod_base = OTHER; note = 2'-O-methyl modified nucleoside with phosphorothioate linkage
  modified_base 20: mod_base = OTHER; note = 2'-O-methyl modified nucleoside with phosphorothioate linkage
  modified_base 21: mod_base = OTHER; note = 2'-O-methyl modified nucleoside
aagaaaagcagaacggtgatt

SEQ ID NO: 3274 - RNA, 21 nt, synthetic construct
  source 1..21: mol_type = other RNA
  modified_base 1: mod_base = OTHER; note = 2'-O-methyl modified nucleoside with phosphorothioate linkage
  modified_base 2: mod_base = OTHER; note = 2'-fluoro modified nucleoside with phosphorothioate linkage
  modified_base 3: mod_base = OTHER; note = 2'-O-methyl modified nucleoside
  modified_base 4: mod_base = OTHER; note = 2'-fluoro modified nucleoside
  modified_base 5: mod_base = OTHER; note = 2'-O-methyl modified nucleoside
  modified_base 6: mod_base = OTHER; note = 2'-fluoro modified nucleoside
  modified_base 7: mod_base = OTHER; note = 2'-O-methyl modified nucleoside
  modified_base 8: mod_base = OTHER; note = 2'-fluoro modified nucleoside
  modified_base 9: mod_base = OTHER; note = 2'-O-methyl modified nucleoside
  modified_base 10: mod_base = OTHER; note = 2'-fluoro modified nucleoside
  modified_base 11: mod_base = OTHER; note = 2'-O-methyl modified nucleoside
  modified_base 12: mod_base = OTHER; note = 2'-fluoro modified nucleoside
  modified_base 13: mod_base = OTHER; note = 2'-O-methyl modified nucleoside
  modified_base 14: mod_base = OTHER; note = 2'-fluoro modified nucleoside
  modified_base 15: mod_base = OTHER; note = 2'-O-methyl modified nucleoside
  modified_base 16: mod_base = OTHER; note = 2'-fluoro modified nucleoside
  modified_base 17: mod_base = OTHER; note = 2'-O-methyl modified nucleoside
  modified_base 18: mod_base = OTHER; note = 2'-fluoro modified nucleoside
  modified_base 19: mod_base = OTHER; note = 2'-O-methyl modified nucleoside with phosphorothioate linkage
  modified_base 20: mod_base = OTHER; note = 2'-O-methyl modified nucleoside with phosphorothioate linkage
  modified_base 21: mod_base = OTHER; note = 2'-O-methyl modified nucleoside
tcaccgttctgcttttctttt

SEQ ID NO: 3275 - RNA, 21 nt, synthetic construct
  source 1..21: mol_type = other RNA
  modified_base 1: mod_base = OTHER; note = 2'-O-methyl modified nucleoside with phosphorothioate linkage
  modified_base 2: mod_base = OTHER; note = 2'-fluoro modified nucleoside with phosphorothioate linkage
  modified_base 3: mod_base = OTHER; note = 2'-O-methyl modified nucleoside
  modified_base 4: mod_base = OTHER; note = 2'-fluoro modified nucleoside
  modified_base 5: mod_base = OTHER; note = 2'-O-methyl modified nucleoside
  modified_base 6: mod_base = OTHER; note = 2'-fluoro modified nucleoside
  modified_base 7: mod_base = OTHER; note = 2'-O-methyl modified nucleoside
  modified_base 8: mod_base = OTHER; note = 2'-fluoro modified nucleoside
  modified_base 9: mod_base = OTHER; note = 2'-O-methyl modified nucleoside
  modified_base 10: mod_base = OTHER; note = 2'-fluoro modified nucleoside
  modified_base 11: mod_base = OTHER; note = 2'-O-methyl modified nucleoside
  modified_base 12: mod_base = OTHER; note = 2'-fluoro modified nucleoside
  modified_base 13: mod_base = OTHER; note = 2'-O-methyl modified nucleoside
  modified_base 14: mod_base = OTHER; note = 2'-fluoro modified nucleoside
  modified_base 15: mod_base = OTHER; note = 2'-O-methyl modified nucleoside
  modified_base 16: mod_base = OTHER; note = 2'-fluoro modified nucleoside
  modified_base 17: mod_base = OTHER; note = 2'-O-methyl modified nucleoside
  modified_base 18: mod_base = OTHER; note = 2'-fluoro modified nucleoside
  modified_base 19: mod_base = OTHER; note = 2'-O-methyl modified nucleoside with phosphorothioate linkage
  modified_base 20: mod_base = OTHER; note = 2'-O-methyl modified nucleoside with phosphorothioate linkage
  modified_base 21: mod_base = OTHER; note = 2'-O-methyl modified nucleoside
tcaccgttctgcttttctttt

SEQ ID NO: 3276 - RNA, 21 nt, synthetic construct
  source 1..21: mol_type = other RNA
  modified_base 1: mod_base = OTHER; note = 2'-O-methyl modified nucleoside with phosphorothioate linkage
  modified_base 2: mod_base = OTHER; note = 2'-fluoro modified nucleoside with phosphorothioate linkage
  modified_base 3: mod_base = OTHER; note = 2'-O-methyl modified nucleoside
  modified_base 4: mod_base = OTHER; note = 2'-fluoro modified nucleoside
  modified_base 5: mod_base = OTHER; note = 2'-O-methyl modified nucleoside
  modified_base 6: mod_base = OTHER; note = 2'-fluoro modified nucleoside
  modified_base 7: mod_base = OTHER; note = 2'-O-methyl modified nucleoside
  modified_base 8: mod_base = OTHER; note = 2'-fluoro modified nucleoside
  modified_base 9: mod_base = OTHER; note = 2'-O-methyl modified nucleoside
  modified_base 10: mod_base = OTHER; note = 2'-fluoro modified nucleoside
  modified_base 11: mod_base = OTHER; note = 2'-O-methyl modified nucleoside
  modified_base 12: mod_base = OTHER; note = 2'-fluoro modified nucleoside
  modified_base 13: mod_base = OTHER; note = 2'-O-methyl modified nucleoside
  modified_base 14: mod_base = OTHER; note = 2'-fluoro modified nucleoside
  modified_base 15: mod_base = OTHER; note = 2'-O-methyl modified nucleoside
  modified_base 16: mod_base = OTHER; note = 2'-fluoro modified nucleoside
  modified_base 17: mod_base = OTHER; note = 2'-O-methyl modified nucleoside
  modified_base 18: mod_base = OTHER; note = 2'-fluoro modified nucleoside
  modified_base 19: mod_base = OTHER; note = 2'-O-methyl modified nucleoside with phosphorothioate linkage
  modified_base 20: mod_base = OTHER; note = 2'-O-methyl modified nucleoside with phosphorothioate linkage
  modified_base 21: mod_base = OTHER; note = 2'-O-methyl modified nucleoside
tcaccgttctgcttttctttt

SEQ ID NO: 3277 - RNA, 21 nt, synthetic construct
  source 1..21: mol_type = other RNA
  modified_base 1: mod_base = OTHER; note = 2'-O-methyl modified nucleoside with phosphorothioate linkage
  modified_base 2: mod_base = OTHER; note = 2'-fluoro modified nucleoside with phosphorothioate linkage
  modified_base 3: mod_base = OTHER; note = 2'-O-methyl modified nucleoside
  modified_base 4: mod_base = OTHER; note = 2'-fluoro modified nucleoside
  modified_base 5: mod_base = OTHER; note = 2'-O-methyl modified nucleoside
  modified_base 6: mod_base = OTHER; note = 2'-fluoro modified nucleoside
  modified_base 7: mod_base = OTHER; note = 2'-O-methyl modified nucleoside
  modified_base 8: mod_base = OTHER; note = 2'-fluoro modified nucleoside
  modified_base 9: mod_base = OTHER; note = 2'-O-methyl modified nucleoside
  modified_base 10: mod_base = OTHER; note = 2'-fluoro modified nucleoside
  modified_base 11: mod_base = OTHER; note = 2'-O-methyl modified nucleoside
  modified_base 12: mod_base = OTHER; note = 2'-fluoro modified nucleoside
  modified_base 13: mod_base = OTHER; note = 2'-O-methyl modified nucleoside
  modified_base 14: mod_base = OTHER; note = 2'-fluoro modified nucleoside
  modified_base 15: mod_base = OTHER; note = 2'-O-methyl modified nucleoside
  modified_base 16: mod_base = OTHER; note = 2'-fluoro modified nucleoside
  modified_base 17: mod_base = OTHER; note = 2'-O-methyl modified nucleoside
  modified_base 18: mod_base = OTHER; note = 2'-fluoro modified nucleoside
  modified_base 19: mod_base = OTHER; note = 2'-O-methyl modified nucleoside with phosphorothioate linkage
  modified_base 20: mod_base = OTHER; note = 2'-O-methyl modified nucleoside with phosphorothioate linkage
  modified_base 21: mod_base = OTHER; note = 2'-O-methyl modified nucleoside
tcaccgttctgcttttctttt

SEQ ID NO: 3278 - RNA, 21 nt, synthetic construct
  source 1..21: mol_type = other RNA
  modified_base 1: mod_base = OTHER; note = 2'-O-methyl modified nucleoside with phosphorothioate linkage
  modified_base 2: mod_base = OTHER; note = 2'-fluoro modified nucleoside with phosphorothioate linkage
  modified_base 3: mod_base = OTHER; note = 2'-O-methyl modified nucleoside
  modified_base 4: mod_base = OTHER; note = 2'-fluoro modified nucleoside
  modified_base 5: mod_base = OTHER; note = 2'-O-methyl modified nucleoside
  modified_base 6: mod_base = OTHER; note = 2'-fluoro modified nucleoside
  modified_base 7: mod_base = OTHER; note = 2'-O-methyl modified nucleoside
  modified_base 8: mod_base = OTHER; note = 2'-fluoro modified nucleoside
  modified_base 9: mod_base = OTHER; note = 2'-O-methyl modified nucleoside
  modified_base 10: mod_base = OTHER; note = 2'-fluoro modified nucleoside
  modified_base 11: mod_base = OTHER; note = 2'-O-methyl modified nucleoside
  modified_base 12: mod_base = OTHER; note = 2'-fluoro modified nucleoside
  modified_base 13: mod_base = OTHER; note = 2'-O-methyl modified nucleoside
  modified_base 14: mod_base = OTHER; note = 2'-fluoro modified nucleoside
  modified_base 15: mod_base = OTHER; note = 2'-O-methyl modified nucleoside
  modified_base 16: mod_base = OTHER; note = 2'-fluoro modified nucleoside
  modified_base 17: mod_base = OTHER; note = 2'-O-methyl modified nucleoside
  modified_base 18: mod_base = OTHER; note = 2'-fluoro modified nucleoside
  modified_base 19: mod_base = OTHER; note = 2'-O-methyl modified nucleoside with phosphorothioate linkage
  modified_base 20: mod_base = OTHER; note = 2'-O-methyl modified nucleoside with phosphorothioate linkage
  modified_base 21: mod_base = OTHER; note = 2'-O-methyl modified nucleoside
tcaccgttctgcttttctttt

SEQ ID NO: 3279 - RNA, 21 nt, synthetic construct
  source 1..21: mol_type = other RNA
  modified_base 1: mod_base = OTHER; note = 2'-O-methyl modified nucleoside with phosphorothioate linkage
  modified_base 2: mod_base = OTHER; note = 2'-fluoro modified nucleoside with phosphorothioate linkage
  modified_base 3: mod_base = OTHER; note = 2'-O-methyl modified nucleoside
  modified_base 4: mod_base = OTHER; note = 2'-fluoro modified nucleoside
  modified_base 5: mod_base = OTHER; note = 2'-O-methyl modified nucleoside
  modified_base 6: mod_base = OTHER; note = 2'-fluoro modified nucleoside
  modified_base 7: mod_base = OTHER; note = 2'-O-methyl modified nucleoside
  modified_base 8: mod_base = OTHER; note = 2'-fluoro modified nucleoside
  modified_base 9: mod_base = OTHER; note = 2'-O-methyl modified nucleoside
  modified_base 10: mod_base = OTHER; note = 2'-fluoro modified nucleoside
  modified_base 11: mod_base = OTHER; note = 2'-O-methyl modified nucleoside
  modified_base 12: mod_base = OTHER; note = 2'-fluoro modified nucleoside
  modified_base 13: mod_base = OTHER; note = 2'-O-methyl modified nucleoside
  modified_base 14: mod_base = OTHER; note = 2'-fluoro modified nucleoside
  modified_base 15: mod_base = OTHER; note = 2'-O-methyl modified nucleoside
  modified_base 16: mod_base = OTHER; note = 2'-fluoro modified nucleoside
  modified_base 17: mod_base = OTHER; note = 2'-O-methyl modified nucleoside
  modified_base 18: mod_base = OTHER; note = 2'-fluoro modified nucleoside
  modified_base 19: mod_base = OTHER; note = 2'-O-methyl modified nucleoside with phosphorothioate linkage
  modified_base 20: mod_base = OTHER; note = 2'-O-methyl modified nucleoside with phosphorothioate linkage
  modified_base 21: mod_base = OTHER; note = 2'-O-methyl modified nucleoside
tcaccgttctgcttttctttt

SEQ ID NO: 3280 - RNA, 21 nt, synthetic construct
  source 1..21: mol_type = other RNA
  modified_base 1: mod_base = OTHER; note = 2'-O-methyl modified nucleoside with phosphorothioate linkage
  modified_base 2: mod_base = OTHER; note = 2'-fluoro modified nucleoside with phosphorothioate linkage
  modified_base 3: mod_base = OTHER; note = 2'-O-methyl modified nucleoside
  modified_base 4: mod_base = OTHER; note = 2'-fluoro modified nucleoside
  modified_base 5: mod_base = OTHER; note = 2'-O-methyl modified nucleoside
  modified_base 6: mod_base = OTHER; note = 2'-fluoro modified nucleoside
  modified_base 7: mod_base = OTHER; note = 2'-O-methyl modified nucleoside
  modified_base 8: mod_base = OTHER; note = 2'-fluoro modified nucleoside
  modified_base 9: mod_base = OTHER; note = 2'-O-methyl modified nucleoside
  modified_base 10: mod_base = OTHER; note = 2'-fluoro modified nucleoside
  modified_base 11: mod_base = OTHER; note = 2'-O-methyl modified nucleoside
  modified_base 12: mod_base = OTHER; note = 2'-fluoro modified nucleoside
  modified_base 13: mod_base = OTHER; note = 2'-O-methyl modified nucleoside
  modified_base 14: mod_base = OTHER; note = 2'-fluoro modified nucleoside
  modified_base 15: mod_base = OTHER; note = 2'-O-methyl modified nucleoside
  modified_base 16: mod_base = OTHER; note = 2'-fluoro modified nucleoside
  modified_base 17: mod_base = OTHER; note = 2'-O-methyl modified nucleoside
  modified_base 18: mod_base = OTHER; note = 2'-fluoro modified nucleoside
  modified_base 19: mod_base = OTHER; note = 2'-O-methyl modified nucleoside with phosphorothioate linkage
  modified_base 20: mod_base = OTHER; note = 2'-O-methyl modified nucleoside with phosphorothioate linkage
  modified_base 21: mod_base = OTHER; note = 2'-O-methyl modified nucleoside
tcaccgttctgcttttctttt

SEQ ID NO: 3281 - RNA, 19 nt, synthetic construct
  source 1..19: mol_type = other RNA
aagaaaagcagaacggtga

SEQ ID NO: 3282 - RNA, 19 nt, synthetic construct
  source 1..19: mol_type = other RNA
aagaaaagcagaacggtga

SEQ ID NO: 3283 - RNA, 19 nt, synthetic construct
  source 1..19: mol_type = other RNA
aagaaaagcagaacggtga

SEQ ID NO: 3284 - RNA, 19 nt, synthetic construct
  source 1..19: mol_type = other RNA
aagaaaagcagaacggtga

SEQ ID NO: 3285 - RNA, 19 nt, synthetic construct
  source 1..19: mol_type = other RNA
aagaaaagcagaacggtga

SEQ ID NO: 3286 - RNA, 19 nt, synthetic construct
  source 1..19: mol_type = other RNA
aagaaaagcagaacggtga

SEQ ID NO: 3287 - RNA, 19 nt, synthetic construct
  source 1..19: mol_type = other RNA
aagaaaagcagaacggtga

SEQ ID NO: 3288 - RNA, 19 nt, synthetic construct
  source 1..19: mol_type = other RNA
tcaccgttctgcttttctt

SEQ ID NO: 3289 - RNA, 19 nt, synthetic construct
  source 1..19: mol_type = other RNA
tcaccgttctgcttttctt

SEQ ID NO: 3290 - RNA, 19 nt, synthetic construct
  source 1..19: mol_type = other RNA
tcaccgttctgcttttctt

SEQ ID NO: 3291 - RNA, 19 nt, synthetic construct
  source 1..19: mol_type = other RNA
tcaccgttctgcttttctt

SEQ ID NO: 3292 - skipped

SEQ ID NO: 3293 - RNA, 19 nt, synthetic construct
  source 1..19: mol_type = other RNA
tcaccgttctgcttttctt

SEQ ID NO: 3294 - RNA, 19 nt, synthetic construct
  source 1..19: mol_type = other RNA
tcaccgttctgcttttctt

SEQ ID NO: 3295 - RNA, 19 nt, synthetic construct
  source 1..19: mol_type = other RNA
tcaccgttctgcttttctt

SEQ ID NO: 3296 - RNA, 21 nt, synthetic construct
  source 1..21: mol_type = other RNA
  misc_feature 1: note = ETL20 moiety
  modified_base 1: mod_base = OTHER; note = 2'-O-methyl modified nucleoside
  modified_base 2: mod_base = OTHER; note = 2'-O-methyl modified nucleoside
  modified_base 3: mod_base = OTHER; note = 2'-O-methyl modified nucleoside
  modified_base 4: mod_base = OTHER; note = 2'-methoxy ethyl modified nucleoside
  modified_base 5: mod_base = OTHER; note = 2'-O-methyl modified nucleoside
  modified_base 6: mod_base = OTHER; note = 2'-fluoro modified nucleoside
  modified_base 7: mod_base = OTHER; note = 2'-fluoro modified nucleoside
  modified_base 8: mod_base = OTHER; note = 2'-fluoro modified nucleoside
  modified_base 9: mod_base = OTHER; note = 2'-fluoro modified nucleoside
  modified_base 10: mod_base = OTHER; note = 2'-O-methyl modified nucleoside
  modified_base 11: mod_base = OTHER; note = 2'-O-methyl modified nucleoside
  modified_base 12: mod_base = OTHER; note = 2'-O-methyl modified nucleoside
  modified_base 13: mod_base = OTHER; note = 2'-methoxy ethyl modified nucleoside
  modified_base 14: mod_base = OTHER; note = 2'-O-methyl modified nucleoside
  modified_base 15: mod_base = OTHER; note = 2'-O-methyl modified nucleoside
  modified_base 16: mod_base = OTHER; note = 2'-O-methyl modified nucleoside
  modified_base 17: mod_base = OTHER; note = 2'-O-methyl modified nucleoside
  modified_base 18: mod_base = OTHER; note = 2'-O-methyl modified nucleoside
  modified_base 19: mod_base = OTHER; note = 2'-O-methyl modified nucleoside with phosphorothioate linkage
  modified_base 20: mod_base = OTHER; note = 2'-O-methyl modified nucleoside with phosphorothioate linkage
  modified_base 21: mod_base = OTHER; note = 2'-O-methyl modified nucleoside
aagaaaagcagaacggtgatt

SEQ ID NO: 3297 - RNA, 21 nt, synthetic construct
  source 1..21: mol_type = other RNA
  misc_feature 1: note = ETL20 moiety
  modified_base 1: mod_base = OTHER; note = 2'-O-methyl modified nucleoside
  modified_base 2: mod_base = OTHER; note = 2'-O-methyl modified nucleoside
  modified_base 3: mod_base = OTHER; note = 2'-fluoro modified nucleoside
  modified_base 4: mod_base = OTHER; note = 2'-O-methyl modified nucleoside
  modified_base 5: mod_base = OTHER; note = 2'-fluoro modified nucleoside
  modified_base 6: mod_base = OTHER; note = 2'-O-methyl modified nucleoside
  modified_base 7: mod_base = OTHER; note = 2'-fluoro modified nucleoside
  modified_base 8: mod_base = OTHER; note = 2'-O-methyl modified nucleoside
  modified_base 9: mod_base = OTHER; note = 2'-fluoro modified nucleoside
  modified_base 10: mod_base = OTHER; note = 2'-O-methyl modified nucleoside
  modified_base 11: mod_base = OTHER; note = 2'-fluoro modified nucleoside
  modified_base 12: mod_base = OTHER; note = 2'-O-methyl modified nucleoside
  modified_base 13: mod_base = OTHER; note = 2'-fluoro modified nucleoside
  modified_base 14: mod_base = OTHER; note = 2'-O-methyl modified nucleoside
  modified_base 15: mod_base = OTHER; note = 2'-O-methyl modified nucleoside
  modified_base 16: mod_base = OTHER; note = 2'-O-methyl modified nucleoside
  modified_base 17: mod_base = OTHER; note = 2'-fluoro modified nucleoside
  modified_base 18: mod_base = OTHER; note = 2'-O-methyl modified nucleoside
  modified_base 19: mod_base = OTHER; note = 2'-fluoro modified nucleoside with phosphorothioate linkage
  modified_base 20: mod_base = OTHER; note = 2'-O-methyl modified nucleoside with phosphorothioate linkage
  modified_base 21: mod_base = OTHER; note = 2'-O-methyl modified nucleoside
ctacaaaggtgaactcagatt

SEQ ID NO: 3298 - RNA, 21 nt, synthetic construct
  source 1..21: mol_type = other RNA
  misc_feature 1: note = ETL20 moiety
  modified_base 1: mod_base = OTHER; note = 2'-O-methyl modified nucleoside
  modified_base 2: mod_base = OTHER; note = 2'-O-methyl modified nucleoside
  modified_base 3: mod_base = OTHER; note = 2'-fluoro modified nucleoside
  modified_base 4: mod_base = OTHER; note = 2'-O-methyl modified nucleoside
  modified_base 5: mod_base = OTHER; note = 2'-fluoro modified nucleoside
  modified_base 6: mod_base = OTHER; note = 2'-O-methyl modified nucleoside
  modified_base 7: mod_base = OTHER; note = 2'-fluoro modified nucleoside
  modified_base 8: mod_base = OTHER; note = 2'-O-methyl modified nucleoside
  modified_base 9: mod_base = OTHER; note = 2'-fluoro modified nucleoside
  modified_base 10: mod_base = OTHER; note = 2'-O-methyl modified nucleoside
  modified_base 11: mod_base = OTHER; note = 2'-fluoro modified nucleoside
  modified_base 12: mod_base = OTHER; note = 2'-O-methyl modified nucleoside
  modified_base 13: mod_base = OTHER; note = 2'-fluoro modified nucleoside
  modified_base 14: mod_base = OTHER; note = 2'-O-methyl modified nucleoside
  modified_base 15: mod_base = OTHER; note = 2'-O-methyl modified nucleoside
  modified_base 16: mod_base = OTHER; note = 2'-O-methyl modified nucleoside
  modified_base 17: mod_base = OTHER; note = 2'-fluoro modified nucleoside
  modified_base 18: mod_base = OTHER; note = 2'-O-methyl modified nucleoside
  modified_base 19: mod_base = OTHER; note = 2'-fluoro modified nucleoside with phosphorothioate linkage
  modified_base 20: mod_base = OTHER; note = 2'-O-methyl modified nucleoside with phosphorothioate linkage
  modified_base 21: mod_base = OTHER; note = 2'-O-methyl modified nucleoside
ctacaaaggtgaactcagatt

SEQ ID NO: 3299 - RNA, 21 nt, synthetic construct
  source 1..21: mol_type = other RNA
  misc_feature 1: note = ETL20 moiety with phosphorothioate linkage
  modified_base 1: mod_base = OTHER; note = 2'-O-methyl modified nucleoside with phosphorothioate linkage
  modified_base 2: mod_base = OTHER; note = 2'-O-methyl modified nucleoside
  modified_base 3: mod_base = OTHER; note = 2'-O-methyl modified nucleoside
  modified_base 4: mod_base = OTHER; note = 2'-O-methyl modified nucleoside
  modified_base 5: mod_base = OTHER; note = 2'-O-methyl modified nucleoside
  modified_base 6: mod_base = OTHER; note = 2'-fluoro modified nucleoside
  modified_base 7: mod_base = OTHER; note = 2'-fluoro modified nucleoside
  modified_base 8: mod_base = OTHER; note = 2'-fluoro modified nucleoside
  modified_base 9: mod_base = OTHER; note = 2'-fluoro modified nucleoside
  modified_base 10: mod_base = OTHER; note = 2'-fluoro modified nucleoside
  modified_base 11: mod_base = OTHER; note = 2'-O-methyl modified nucleoside
  modified_base 12: mod_base = OTHER; note = 2'-O-methyl modified nucleoside
  modified_base 13: mod_base = OTHER; note = 2'-O-methyl modified nucleoside
  modified_base 14: mod_base = OTHER; note = 2'-O-methyl modified nucleoside
  modified_base 15: mod_base = OTHER; note = 2'-O-methyl modified nucleoside
  modified_base 16: mod_base = OTHER; note = 2'-O-methyl modified nucleoside
  modified_base 17: mod_base = OTHER; note = 2'-O-methyl modified nucleoside
  modified_base 18: mod_base = OTHER; note = 2'-O-methyl modified nucleoside
  modified_base 19: mod_base = OTHER; note = 2'-O-methyl modified nucleoside with phosphorothioate linkage
  modified_base 20: mod_base = OTHER; note = 2'-O-methyl modified nucleoside with phosphorothioate linkage
  modified_base 21: mod_base = OTHER; note = 2'-O-methyl modified nucleoside
tctacaaaggtgaactcaatt

SEQ ID NO: 3300 - RNA, 21 nt, synthetic construct
  source 1..21: mol_type = other RNA
  misc_feature 1: note = 5VP moiety
  modified_base 1: mod_base = OTHER; note = 2'-O-methyl modified nucleoside with phosphorothioate linkage
  modified_base 2: mod_base = OTHER; note = 2'-fluoro modified nucleoside with phosphorothioate linkage
  modified_base 3: mod_base = OTHER; note = 2'-O-methyl modified nucleoside
  modified_base 4: mod_base = OTHER; note = 2'-fluoro modified nucleoside
  modified_base 5: mod_base = OTHER; note = 2'-O-methyl modified nucleoside
  modified_base 6: mod_base = OTHER; note = 2'-fluoro modified nucleoside
  modified_base 7: mod_base = OTHER; note = 2'-O-methyl modified nucleoside
  modified_base 8: mod_base = OTHER; note = 2'-fluoro modified nucleoside
  modified_base 9: mod_base = OTHER; note = 2'-O-methyl modified nucleoside
  modified_base 10: mod_base = OTHER; note = 2'-fluoro modified nucleoside
  modified_base 11: mod_base = OTHER; note = 2'-O-methyl modified nucleoside
  modified_base 12: mod_base = OTHER; note = 2'-fluoro modified nucleoside
  modified_base 13: mod_base = OTHER; note = 2'-O-methyl modified nucleoside
  modified_base 14: mod_base = OTHER; note = 2'-fluoro modified nucleoside
  modified_base 15: mod_base = OTHER; note = 2'-O-methyl modified nucleoside
  modified_base 16: mod_base = OTHER; note = 2'-fluoro modified nucleoside
  modified_base 17: mod_base = OTHER; note = 2'-O-methyl modified nucleoside
  modified_base 18: mod_base = OTHER; note = 2'-fluoro modified nucleoside
  modified_base 19: mod_base = OTHER; note = 2'-O-methyl modified nucleoside with phosphorothioate linkage
  modified_base 20: mod_base = OTHER; note = 2'-O-methyl modified nucleoside with phosphorothioate linkage
  modified_base 21: mod_base = OTHER; note = 2'-O-methyl modified nucleoside
tcaccgttctgcttttctttt

SEQ ID NO: 3301 - RNA, 21 nt, synthetic construct
  source 1..21: mol_type = other RNA
  modified_base 1: mod_base = OTHER; note = 2'-O-methyl modified nucleoside with phosphorothioate linkage
  modified_base 2: mod_base = OTHER; note = 2'-fluoro modified nucleoside with phosphorothioate linkage
  modified_base 3: mod_base = OTHER; note = 2'-O-methyl modified nucleoside
  modified_base 4: mod_base = OTHER; note = 2'-O-methyl modified nucleoside
  modified_base 5: mod_base = OTHER; note = 2'-O-methyl modified nucleoside
  modified_base 6: mod_base = OTHER; note = 2'-fluoro modified nucleoside
  modified_base 7: mod_base = OTHER; note = 2'-O-methyl modified nucleoside
  modified_base 8: mod_base = OTHER; note = 2'-fluoro modified nucleoside
  modified_base 9: mod_base = OTHER; note = 2'-O-methyl modified nucleoside
  modified_base 10: mod_base = OTHER; note = 2'-O-methyl modified nucleoside
  modified_base 11: mod_base = OTHER; note = 2'-O-methyl modified nucleoside
  modified_base 12: mod_base = OTHER; note = 2'-O-methyl modified nucleoside
  modified_base 13: mod_base = OTHER; note = 2'-O-methyl modified nucleoside
  modified_base 14: mod_base = OTHER; note = 2'-fluoro modified nucleoside
  modified_base 15: mod_base = OTHER; note = 2'-O-methyl modified nucleoside
  modified_base 16: mod_base = OTHER; note = 2'-fluoro modified nucleoside
  modified_base 17: mod_base = OTHER; note = 2'-O-methyl modified nucleoside
  modified_base 18: mod_base = OTHER; note = 2'-O-methyl modified nucleoside
  modified_base 19: mod_base = OTHER; note = 2'-O-methyl modified nucleoside with phosphorothioate linkage
  modified_base 20: mod_base = OTHER; note = 2'-O-methyl modified nucleoside with phosphorothioate linkage
  modified_base 21: mod_base = OTHER; note = 2'-O-methyl modified nucleoside
tctgagttcacctttgtagtt

SEQ ID NO: 3302 - RNA, 21 nt, synthetic construct
  source 1..21: mol_type = other RNA
  misc_feature 1: note = 5VP moiety
  modified_base 1: mod_base = OTHER; note = 2'-O-methyl modified nucleoside with phosphorothioate linkage
  modified_base 2: mod_base = OTHER; note = 2'-fluoro modified nucleoside with phosphorothioate linkage
  modified_base 3: mod_base = OTHER; note = 2'-O-methyl modified nucleoside
  modified_base 4: mod_base = OTHER; note = 2'-O-methyl modified nucleoside
  modified_base 5: mod_base = OTHER; note = 2'-O-methyl modified nucleoside
  modified_base 6: mod_base = OTHER; note = 2'-fluoro modified nucleoside
  modified_base 7: mod_base = OTHER; note = 2'-O-methyl modified nucleoside
  modified_base 8: mod_base = OTHER; note = 2'-fluoro modified nucleoside
  modified_base 9: mod_base = OTHER; note = 2'-O-methyl modified nucleoside
  modified_base 10: mod_base = OTHER; note = 2'-O-methyl modified nucleoside
  modified_base 11: mod_base = OTHER; note = 2'-O-methyl modified nucleoside
  modified_base 12: mod_base = OTHER; note = 2'-O-methyl modified nucleoside
  modified_base 13: mod_base = OTHER; note = 2'-O-methyl modified nucleoside
  modified_base 14: mod_base = OTHER; note = 2'-fluoro modified nucleoside
  modified_base 15: mod_base = OTHER; note = 2'-O-methyl modified nucleoside
  modified_base 16: mod_base = OTHER; note = 2'-fluoro modified nucleoside
  modified_base 17: mod_base = OTHER; note = 2'-O-methyl modified nucleoside
  modified_base 18: mod_base = OTHER; note = 2'-O-methyl modified nucleoside
  modified_base 19: mod_base = OTHER; note = 2'-O-methyl modified nucleoside with phosphorothioate linkage
  modified_base 20: mod_base = OTHER; note = 2'-O-methyl modified nucleoside with phosphorothioate linkage
  modified_base 21: mod_base = OTHER; note = 2'-O-methyl modified nucleoside
tctgagttcacctttgtagtt

SEQ ID NO: 3303 - skipped

SEQ ID NO: 3304 - RNA, 21 nt, synthetic construct
  source 1..21: mol_type = other RNA
  misc_feature 1: note = 5VP moiety
  modified_base 1: mod_base = OTHER; note = 2'-O-methyl modified nucleoside with phosphorothioate linkage
  modified_base 2: mod_base = OTHER; note = 2'-fluoro modified nucleoside with phosphorothioate linkage
  modified_base 3: mod_base = OTHER; note = 2'-O-methyl modified nucleoside
  modified_base 4: mod_base = OTHER; note = 2'-O-methyl modified nucleoside
  modified_base 5: mod_base = OTHER; note = 2'-fluoro modified nucleoside
  modified_base 6: mod_base = OTHER; note = 2'-O-methyl modified nucleoside
  modified_base 7: mod_base = OTHER; note = 2'-fluoro modified nucleoside
  modified_base 8: mod_base = OTHER; note = 2'-O-methyl modified nucleoside
  modified_base 9: mod_base = OTHER; note = 2'-O-methyl modified nucleoside
  modified_base 10: mod_base = OTHER; note = 2'-fluoro modified nucleoside
  modified_base 11: mod_base = OTHER; note = 2'-O-methyl modified nucleoside
  modified_base 12: mod_base = OTHER; note = 2'-fluoro modified nucleoside
  modified_base 13: mod_base = OTHER; note = 2'-O-methyl modified nucleoside
  modified_base 14: mod_base = OTHER; note = 2'-fluoro modified nucleoside
  modified_base 15: mod_base = OTHER; note = 2'-O-methyl modified nucleoside
  modified_base 16: mod_base = OTHER; note = 2'-fluoro modified nucleoside
  modified_base 17: mod_base = OTHER; note = 2'-O-methyl modified nucleoside
  modified_base 18: mod_base = OTHER; note = 2'-fluoro modified nucleoside
  modified_base 19: mod_base = OTHER; note = 2'-O-methyl modified nucleoside with phosphorothioate linkage
  modified_base 20: mod_base = OTHER; note = 2'-O-methyl modified nucleoside with phosphorothioate linkage
  modified_base 21: mod_base = OTHER; note = 2'-O-methyl modified nucleoside
ttgagttcacctttgtagatt

SEQ ID NO: 3305 - RNA, 21 nt, synthetic construct
  source 1..21: mol_type = other RNA
  misc_feature 1: note = ETL17 moiety with phosphorothioate linkage
  modified_base 1: mod_base = OTHER; note = 2'-O-methyl modified nucleoside
  modified_base 2: mod_base = OTHER; note = 2'-O-methyl modified nucleoside
  modified_base 3: mod_base = OTHER; note = 2'-O-methyl modified nucleoside
  modified_base 4: mod_base = OTHER; note = 2'-O-methyl modified nucleoside
  modified_base 5: mod_base = OTHER; note = 2'-O-methyl modified nucleoside
  modified_base 6: mod_base = OTHER; note = 2'-fluoro modified nucleoside
  modified_base 7: mod_base = OTHER; note = 2'-fluoro modified nucleoside
  modified_base 8: mod_base = OTHER; note = 2'-fluoro modified nucleoside
  modified_base 9: mod_base = OTHER; note = 2'-fluoro modified nucleoside
  modified_base 10: mod_base = OTHER; note = 2'-O-methyl modified nucleoside
  modified_base 11: mod_base = OTHER; note = 2'-O-methyl modified nucleoside
  modified_base 12: mod_base = OTHER; note = 2'-O-methyl modified nucleoside
  modified_base 13: mod_base = OTHER; note = 2'-O-methyl modified nucleoside
  modified_base 14: mod_base = OTHER; note = 2'-O-methyl modified nucleoside
  modified_base 15: mod_base = OTHER; note = 2'-O-methyl modified nucleoside
  modified_base 16: mod_base = OTHER; note = 2'-O-methyl modified nucleoside
  modified_base 17: mod_base = OTHER; note = 2'-O-methyl modified nucleoside
  modified_base 18: mod_base = OTHER; note = 2'-O-methyl modified nucleoside
  modified_base 19: mod_base = OTHER; note = 2'-O-methyl modified nucleoside with phosphorothioate linkage
  modified_base 20: mod_base = OTHER; note = 2'-O-methyl modified nucleoside with phosphorothioate linkage
  modified_base 21: mod_base = OTHER; note = 2'-O-methyl modified nucleoside
aagaaaagcagaacggtgatt

SEQ ID NO: 3306 - RNA, 21 nt, synthetic construct
  source 1..21: mol_type = other RNA
  misc_feature 1: note = ETL17 moiety with phosphorothioate linkage
  modified_base 1: mod_base = OTHER; note = 2'-O-methyl modified nucleoside
  modified_base 2: mod_base = OTHER; note = 2'-O-methyl modified nucleoside
  modified_base 3: mod_base = OTHER; note = 2'-O-methyl modified nucleoside
  modified_base 4: mod_base = OTHER; note = 2'-methoxy ethyl modified nucleoside
  modified_base 5: mod_base = OTHER; note = 2'-O-methyl modified nucleoside
  modified_base 6: mod_base = OTHER; note = 2'-fluoro modified nucleoside
  modified_base 7: mod_base = OTHER; note = 2'-fluoro modified nucleoside
  modified_base 8: mod_base = OTHER; note = 2'-fluoro modified nucleoside
  modified_base 9: mod_base = OTHER; note = 2'-fluoro modified nucleoside
  modified_base 10: mod_base = OTHER; note = 2'-O-methyl modified nucleoside
  modified_base 11: mod_base = OTHER; note = 2'-O-methyl modified nucleoside
  modified_base 12: mod_base = OTHER; note = 2'-O-methyl modified nucleoside
  modified_base 13: mod_base = OTHER; note = 2'-methoxy ethyl modified nucleoside
  modified_base 14: mod_base = OTHER; note = 2'-O-methyl modified nucleoside
  modified_base 15: mod_base = OTHER; note = 2'-O-methyl modified nucleoside
  modified_base 16: mod_base = OTHER; note = 2'-O-methyl modified nucleoside
  modified_base 17: mod_base = OTHER; note = 2'-O-methyl modified nucleoside
  modified_base 18: mod_base = OTHER; note = 2'-O-methyl modified nucleoside
  modified_base 19: mod_base = OTHER; note = 2'-O-methyl modified nucleoside with phosphorothioate linkage
  modified_base 20: mod_base = OTHER; note = 2'-O-methyl modified nucleoside with phosphorothioate linkage
  modified_base 21: mod_base = OTHER; note = 2'-O-methyl modified nucleoside
aagaaaagcagaacggtgatt

SEQ ID NO: 3307 - RNA, 21 nt, synthetic construct
  source 1..21: mol_type = other RNA
  misc_feature 1: note = ETL17 moiety with phosphorothioate linkage
  modified_base 1: mod_base = OTHER; note = 2'-O-methyl modified nucleoside
  modified_base 2: mod_base = OTHER; note = 2'-O-methyl modified nucleoside
  modified_base 3: mod_base = OTHER; note = 2'-O-methyl modified nucleoside
  modified_base 4: mod_base = OTHER; note = 2'-methoxy ethyl modified nucleoside
  modified_base 5: mod_base = OTHER; note = 2'-O-methyl modified nucleoside
  modified_base 6: mod_base = OTHER; note = 2'-fluoro modified nucleoside
  modified_base 7: mod_base = OTHER; note = 2'-fluoro modified nucleoside
  modified_base 8: mod_base = OTHER; note = 2'-fluoro modified nucleoside
  modified_base 9: mod_base = OTHER; note = 2'-fluoro modified nucleoside
  modified_base 10: mod_base = OTHER; note = 2'-O-methyl modified nucleoside
  modified_base 11: mod_base = OTHER; note = 2'-O-methyl modified nucleoside
  modified_base 12: mod_base = OTHER; note = 2'-methoxy ethyl modified nucleoside
  modified_base 13: mod_base = OTHER; note = 2'-O-methyl modified nucleoside
  modified_base 14: mod_base = OTHER; note = 2'-O-methyl modified nucleoside
  modified_base 15: mod_base = OTHER; note = 2'-O-methyl modified nucleoside
  modified_base 16: mod_base = OTHER; note = 2'-O-methyl modified nucleoside
  modified_base 17: mod_base = OTHER; note = 2'-O-methyl modified nucleoside
  modified_base 18: mod_base = OTHER; note = 2'-O-methyl modified nucleoside
  modified_base 19: mod_base = OTHER; note = 2'-O-methyl modified nucleoside with phosphorothioate linkage
  modified_base 20: mod_base = OTHER; note = 2'-O-methyl modified nucleoside with phosphorothioate linkage
  modified_base 21: mod_base = OTHER; note = 2'-O-methyl modified nucleoside
tctacaaaggtgaactcaatt

SEQ ID NO: 3308 - RNA, 21 nt, synthetic construct
  source 1..21: mol_type = other RNA
  misc_feature 1: note = ETL17 moiety with phosphorothioate linkage
  modified_base 1: mod_base = OTHER; note = 2'-O-methyl modified nucleoside
  modified_base 2: mod_base = OTHER; note = 2'-O-methyl modified nucleoside
  modified_base 3: mod_base = OTHER; note = 2'-O-methyl modified nucleoside
  modified_base 4: mod_base = OTHER; note = 2'-methoxy ethyl modified nucleoside
  modified_base 5: mod_base = OTHER; note = 2'-O-methyl modified nucleoside
  modified_base 6: mod_base = OTHER; note = 2'-fluoro modified nucleoside
  modified_base 7: mod_base = OTHER; note = 2'-fluoro modified nucleoside
  modified_base 8: mod_base = OTHER; note = 2'-fluoro modified nucleoside
  modified_base 9: mod_base = OTHER; note = 2'-fluoro modified nucleoside
  modified_base 10: mod_base = OTHER; note = 2'-O-methyl modified nucleoside
  modified_base 11: mod_base = OTHER; note = 2'-O-methyl modified nucleoside
  modified_base 12: mod_base = OTHER; note = 2'-O-methyl modified nucleoside
  modified_base 13: mod_base = OTHER; note = 2'-methoxy ethyl modified nucleoside
  modified_base 14: mod_base = OTHER; note = 2'-O-methyl modified nucleoside
  modified_base 15: mod_base = OTHER; note = 2'-O-methyl modified nucleoside
  modified_base 16: mod_base = OTHER; note = 2'-O-methyl modified nucleoside
  modified_base 17: mod_base = OTHER; note = 2'-O-methyl modified nucleoside
  modified_base 18: mod_base = OTHER; note = 2'-O-methyl modified nucleoside
  modified_base 19: mod_base = OTHER; note = 2'-O-methyl modified nucleoside with phosphorothioate linkage
  modified_base 20: mod_base = OTHER; note = 2'-O-methyl modified nucleoside with phosphorothioate linkage
  modified_base 21: mod_base = OTHER; note = 2'-O-methyl modified nucleoside
tctacaaaggtgaactcaatt

SEQ ID NO: 3309 - RNA, 21 nt, synthetic construct
  source 1..21: mol_type = other RNA
  misc_feature 1: note = ETL17 moiety with phosphorothioate linkage
  modified_base 1: mod_base = OTHER; note = 2'-O-methyl modified nucleoside
  modified_base 2: mod_base = OTHER; note = 2'-O-methyl modified nucleoside
  modified_base 3: mod_base = OTHER; note = 2'-O-methyl modified nucleoside
  modified_base 4: mod_base = OTHER; note = 2'-methoxy ethyl modified nucleoside
  modified_base 5: mod_base = OTHER; note = 2'-O-methyl modified nucleoside
  modified_base 6: mod_base = OTHER; note = 2'-fluoro modified nucleoside
  modified_base 7: mod_base = OTHER; note = 2'-fluoro modified nucleoside
  modified_base 8: mod_base = OTHER; note = 2'-fluoro modified nucleoside
  modified_base 9: mod_base = OTHER; note = 2'-fluoro modified nucleoside
  modified_base 10: mod_base = OTHER; note = 2'-O-methyl modified nucleoside
  modified_base 11: mod_base = OTHER; note = 2'-O-methyl modified nucleoside
  modified_base 12: mod_base = OTHER; note = 2'-O-methyl modified nucleoside
  modified_base 13: mod_base = OTHER; note = 2'-O-methyl modified nucleoside
  modified_base 14: mod_base = OTHER; note = 2'-methoxy ethyl modified nucleoside
  modified_base 15: mod_base = OTHER; note = 2'-O-methyl modified nucleoside
  modified_base 16: mod_base = OTHER; note = 2'-O-methyl modified nucleoside
  modified_base 17: mod_base = OTHER; note = 2'-O-methyl modified nucleoside
  modified_base 18: mod_base = OTHER; note = 2'-O-methyl modified nucleoside
  modified_base 19: mod_base = OTHER; note = 2'-O-methyl modified nucleoside with phosphorothioate linkage
  modified_base 20: mod_base = OTHER; note = 2'-O-methyl modified nucleoside with phosphorothioate linkage
  modified_base 21: mod_base = OTHER; note = 2'-O-methyl modified nucleoside
tctacaaaggtgaactcaatt

SEQ ID NO: 3310 - RNA, 21 nt, synthetic construct
  source 1..21: mol_type = other RNA
  misc_feature 1: note = ETL17 moiety with phosphorothioate linkage
  modified_base 1: mod_base = OTHER; note = 2'-O-methyl modified nucleoside
  modified_base 2: mod_base = OTHER; note = 2'-O-methyl modified nucleoside
  modified_base 3: mod_base = OTHER; note = 2'-O-methyl modified nucleoside
  modified_base 4: mod_base = OTHER; note = 2'-methoxy ethyl modified nucleoside
  modified_base 5: mod_base = OTHER; note = 2'-O-methyl modified nucleoside
  modified_base 6: mod_base = OTHER; note = 2'-O-methyl modified nucleoside
  modified_base 7: mod_base = OTHER; note = 2'-fluoro modified nucleoside
  modified_base 8: mod_base = OTHER; note = 2'-fluoro modified nucleoside
  modified_base 9: mod_base = OTHER; note = 2'-fluoro modified nucleoside
  modified_base 10: mod_base = OTHER; note = 2'-fluoro modified nucleoside
  modified_base 11: mod_base = OTHER; note = 2'-O-methyl modified nucleoside
  modified_base 12: mod_base = OTHER; note = 2'-O-methyl modified nucleoside
  modified_base 13: mod_base = OTHER; note = 2'-methoxy ethyl modified nucleoside
  modified_base 14: mod_base = OTHER; note = 2'-O-methyl modified nucleoside
  modified_base 15: mod_base = OTHER; note = 2'-O-methyl modified nucleoside
  modified_base 16: mod_base = OTHER; note = 2'-O-methyl modified nucleoside
  modified_base 17: mod_base = OTHER; note = 2'-O-methyl modified nucleoside
  modified_base 18: mod_base = OTHER; note = 2'-O-methyl modified nucleoside
  modified_base 19: mod_base = OTHER; note = 2'-O-methyl modified nucleoside with phosphorothioate linkage
  modified_base 20: mod_base = OTHER; note = 2'-O-methyl modified nucleoside with phosphorothioate linkage
  modified_base 21: mod_base = OTHER; note = 2'-O-methyl modified nucleoside
gaagaaaagcagaacggtatt

SEQ ID NO: 3311 - RNA, 21 nt, synthetic construct
  source 1..21: mol_type = other RNA
  misc_feature 1: note = ETL17 moiety with phosphorothioate linkage
  modified_base 1: mod_base = OTHER; note = 2'-O-methyl modified nucleoside
  modified_base 2: mod_base = OTHER; note = 2'-O-methyl modified nucleoside
  modified_base 3: mod_base = OTHER; note = 2'-O-methyl modified nucleoside
  modified_base 4: mod_base = OTHER; note = 2'-methoxy ethyl modified nucleoside
  modified_base 5: mod_base = OTHER; note = 2'-fluoro modified nucleoside
  modified_base 6: mod_base = OTHER; note = 2'-O-methyl modified nucleoside
  modified_base 7: mod_base = OTHER; note = 2'-fluoro modified nucleoside
  modified_base 8: mod_base = OTHER; note = 2'-fluoro modified nucleoside
  modified_base 9: mod_base = OTHER; note = 2'-fluoro modified nucleoside
  modified_base 10: mod_base = OTHER; note = 2'-fluoro modified nucleoside
  modified_base 11: mod_base = OTHER; note = 2'-O-methyl modified nucleoside
  modified_base 12: mod_base = OTHER; note = 2'-O-methyl modified nucleoside
  modified_base 13: mod_base = OTHER; note = 2'-methoxy ethyl modified nucleoside
  modified_base 14: mod_base = OTHER; note = 2'-O-methyl modified nucleoside
  modified_base 15: mod_base = OTHER; note = 2'-O-methyl modified nucleoside
  modified_base 16: mod_base = OTHER; note = 2'-O-methyl modified nucleoside
  modified_base 17: mod_base = OTHER; note = 2'-O-methyl modified nucleoside
  modified_base 18: mod_base = OTHER; note = 2'-O-methyl modified nucleoside
  modified_base 19: mod_base = OTHER; note = 2'-O-methyl modified nucleoside with phosphorothioate linkage
  modified_base 20: mod_base = OTHER; note = 2'-O-methyl modified nucleoside with phosphorothioate linkage
  modified_base 21: mod_base = OTHER; note = 2'-O-methyl modified nucleoside
gaagaaaagcagaacggtatt

SEQ ID NO: 3312 - RNA, 21 nt, synthetic construct
  source 1..21: mol_type = other RNA
  misc_feature 1: note = ETL17 moiety with phosphorothioate linkage
  modified_base 1: mod_base = OTHER; note = 2'-O-methyl modified nucleoside
  modified_base 2: mod_base = OTHER; note = 2'-O-methyl modified nucleoside
  modified_base 3: mod_base = OTHER; note = 2'-O-methyl modified nucleoside
  modified_base 4: mod_base = OTHER; note = 2'-methoxy ethyl modified nucleoside
  modified_base 5: mod_base = OTHER; note = 2'-O-methyl modified nucleoside
  modified_base 6: mod_base = OTHER; note = 2'-fluoro modified nucleoside
  modified_base 7: mod_base = OTHER; note = 2'-fluoro modified nucleoside
  modified_base 8: mod_base = OTHER; note = 2'-fluoro modified nucleoside
  modified_base 9: mod_base = OTHER; note = 2'-fluoro modified nucleoside
  modified_base 10: mod_base = OTHER; note = 2'-O-methyl modified nucleoside
  modified_base 11: mod_base = OTHER; note = 2'-O-methyl modified nucleoside
  modified_base 12: mod_base = OTHER; note = 2'-O-methyl modified nucleoside
  modified_base 13: mod_base = OTHER; note = 2'-methoxy ethyl modified nucleoside
  modified_base 14: mod_base = OTHER; note = 2'-O-methyl modified nucleoside
  modified_base 15: mod_base = OTHER; note = 2'-O-methyl modified nucleoside
  modified_base 16: mod_base = OTHER; note = 2'-O-methyl modified nucleoside
  modified_base 17: mod_base = OTHER; note = 2'-O-methyl modified nucleoside
  modified_base 18: mod_base = OTHER; note = 2'-O-methyl modified nucleoside
  modified_base 19: mod_base = OTHER; note = 2'-O-methyl modified nucleoside with phosphorothioate linkage
  modified_base 20: mod_base = OTHER; note = 2'-O-methyl modified nucleoside with phosphorothioate linkage
  modified_base 21: mod_base = OTHER; note = 2'-O-methyl modified nucleoside
gaagaaaagcagaacggtatt

SEQ ID NO: 3313 - RNA, 21 nt, synthetic construct
  source 1..21: mol_type = other RNA
  misc_feature 1: note = ETL17 moiety with phosphorothioate linkage
  modified_base 1: mod_base = OTHER; note = 2'-O-methyl modified nucleoside
  modified_base 2: mod_base = OTHER; note = 2'-O-methyl modified nucleoside
  modified_base 3: mod_base = OTHER; note = 2'-O-methyl modified nucleoside
  modified_base 4: mod_base = OTHER; note = 2'-methoxy ethyl modified nucleoside
  modified_base 5: mod_base = OTHER; note = 2'-O-methyl modified nucleoside
  modified_base 6: mod_base = OTHER; note = 2'-O-methyl modified nucleoside
  modified_base 7: mod_base = OTHER; note = 2'-fluoro modified nucleoside
  modified_base 8: mod_base = OTHER; note = 2'-fluoro modified nucleoside
  modified_base 9: mod_base = OTHER; note = 2'-fluoro modified nucleoside
  modified_base 10: mod_base = OTHER; note = 2'-fluoro modified nucleoside
  modified_base 11: mod_base = OTHER; note = 2'-O-methyl modified nucleoside
  modified_base 12: mod_base = OTHER; note = 2'-O-methyl modified nucleoside
  modified_base 13: mod_base = OTHER; note = 2'-methoxy ethyl modified nucleoside
  modified_base 14: mod_base = OTHER; note = 2'-O-methyl modified nucleoside
  modified_base 15: mod_base = OTHER; note = 2'-O-methyl modified nucleoside
  modified_base 16: mod_base = OTHER; note = 2'-O-methyl modified nucleoside
  modified_base 17: mod_base = OTHER; note = 2'-O-methyl modified nucleoside
  modified_base 18: mod_base = OTHER; note = 2'-O-methyl modified nucleoside
  modified_base 19: mod_base = OTHER; note = 2'-O-methyl modified nucleoside with phosphorothioate linkage
  modified_base 20: mod_base = OTHER; note = 2'-O-methyl modified nucleoside with phosphorothioate linkage
  modified_base 21: mod_base = OTHER; note = 2'-O-methyl modified nucleoside
aagaaaagcagaacggtgatt

SEQ ID NO: 3314 - RNA, 21 nt, synthetic construct
  source 1..21: mol_type = other RNA
  misc_feature 1: note = ETL17 moiety with phosphorothioate linkage
  modified_base 1: mod_base = OTHER; note = 2'-O-methyl modified nucleoside
  modified_base 2: mod_base = OTHER; note = 2'-O-methyl modified nucleoside
  modified_base 3: mod_base = OTHER; note = 2'-O-methyl modified nucleoside
  modified_base 4: mod_base = OTHER; note = 2'-methoxy ethyl modified nucleoside
  modified_base 5: mod_base = OTHER; note = 2'-fluoro modified nucleoside
  modified_base 6: mod_base = OTHER; note = 2'-O-methyl modified nucleoside
  modified_base 7: mod_base = OTHER; note = 2'-fluoro modified nucleoside
  modified_base 8: mod_base = OTHER; note = 2'-fluoro modified nucleoside
  modified_base 9: mod_base = OTHER; note = 2'-fluoro modified nucleoside
  modified_base 10: mod_base = OTHER; note = 2'-fluoro modified nucleoside
  modified_base 11: mod_base = OTHER; note = 2'-O-methyl modified nucleoside
  modified_base 12: mod_base = OTHER; note = 2'-O-methyl modified nucleoside
  modified_base 13: mod_base = OTHER; note = 2'-methoxy ethyl modified nucleoside
  modified_base 14: mod_base = OTHER; note = 2'-O-methyl modified nucleoside
  modified_base 15: mod_base = OTHER; note = 2'-O-methyl modified nucleoside
  modified_base 16: mod_base = OTHER; note = 2'-O-methyl modified nucleoside
  modified_base 17: mod_base = OTHER; note = 2'-O-methyl modified nucleoside
  modified_base 18: mod_base = OTHER; note = 2'-O-methyl modified nucleoside
  modified_base 19: mod_base = OTHER; note = 2'-O-methyl modified nucleoside with phosphorothioate linkage
  modified_base 20: mod_base = OTHER; note = 2'-O-methyl modified nucleoside with phosphorothioate linkage
  modified_base 21: mod_base = OTHER; note = 2'-O-methyl modified nucleoside
aagaaaagcagaacggtgatt

SEQ ID NO: 3315 - RNA, 21 nt, synthetic construct
  source 1..21: mol_type = other RNA
  misc_feature 1: note = ETL17 moiety with phosphorothioate linkage
  modified_base 1: mod_base = OTHER; note = 2'-O-methyl modified nucleoside
  modified_base 2: mod_base = OTHER; note = 2'-O-methyl modified nucleoside
  modified_base 3: mod_base = OTHER; note = 2'-O-methyl modified nucleoside
  modified_base 4: mod_base = OTHER; note = 2'-methoxy ethyl modified nucleoside
  modified_base 5: mod_base = OTHER; note = 2'-O-methyl modified nucleoside
  modified_base 6: mod_base = OTHER; note = 2'-fluoro modified nucleoside
  modified_base 7: mod_base = OTHER; note = 2'-fluoro modified nucleoside
  modified_base 8: mod_base = OTHER; note = 2'-fluoro modified nucleoside
  modified_base 9: mod_base = OTHER; note = 2'-fluoro modified nucleoside
  modified_base 10: mod_base = OTHER; note = 2'-O-methyl modified nucleoside
  modified_base 11: mod_base = OTHER; note = 2'-O-methyl modified nucleoside
  modified_base 12: mod_base = OTHER; note = 2'-O-methyl modified nucleoside
  modified_base 13: mod_base = OTHER; note = 2'-methoxy ethyl modified nucleoside
  modified_base 14: mod_base = OTHER; note = 2'-O-methyl modified nucleoside
  modified_base 15: mod_base = OTHER; note = 2'-O-methyl modified nucleoside
  modified_base 16: mod_base = OTHER; note = 2'-O-methyl modified nucleoside
  modified_base 17: mod_base = OTHER; note = 2'-O-methyl modified nucleoside
  modified_base 18: mod_base = OTHER; note = 2'-O-methyl inosine
  modified_base 19: mod_base = OTHER; note = 2'-O-methyl modified nucleoside with phosphorothioate linkage
  modified_base 20: mod_base = OTHER; note = 2'-O-methyl modified nucleoside with phosphorothioate linkage
  modified_base 21: mod_base = OTHER; note = 2'-O-methyl modified nucleoside
aagaaaagcagaacggtnatt

SEQ ID NO: 3316 - RNA, 21 nt, synthetic construct
  source 1..21: mol_type = other RNA
  misc_feature 1: note = ETL17 moiety with phosphorothioate linkage
  modified_base 1: mod_base = OTHER; note = 2'-O-methyl modified nucleoside
  modified_base 2: mod_base = OTHER; note = 2'-O-methyl modified nucleoside
  modified_base 3: mod_base = OTHER; note = 2'-O-methyl modified nucleoside
  modified_base 4: mod_base = OTHER; note = 2'-methoxy ethyl modified nucleoside
  modified_base 5: mod_base = OTHER; note = 2'-O-methyl modified nucleoside
  modified_base 6: mod_base = OTHER; note = 2'-fluoro modified nucleoside
  modified_base 7: mod_base = OTHER; note = 2'-fluoro modified nucleoside
  modified_base 8: mod_base = OTHER; note = 2'-fluoro modified nucleoside
  modified_base 9: mod_base = OTHER; note = 2'-fluoro modified nucleoside
  modified_base 10: mod_base = OTHER; note = 2'-O-methyl modified nucleoside
  modified_base 11: mod_base = OTHER; note = 2'-O-methyl modified nucleoside
  modified_base 12: mod_base = OTHER; note = 2'-O-methyl modified nucleoside
  modified_base 13: mod_base = OTHER; note = 2'-methoxy ethyl modified nucleoside
  modified_base 14: mod_base = OTHER; note = 2'-O-methyl modified nucleoside
  modified_base 15: mod_base = OTHER; note = 2'-O-methyl modified nucleoside
  modified_base 16: mod_base = OTHER; note = 2'-O-methyl inosine
  modified_base 17: mod_base = OTHER; note = 2'-O-methyl modified nucleoside
  modified_base 18: mod_base = OTHER; note = 2'-O-methyl modified nucleoside
  modified_base 19: mod_base = OTHER; note = 2'-O-methyl modified nucleoside with phosphorothioate linkage
  modified_base 20: mod_base = OTHER; note = 2'-O-methyl modified nucleoside with phosphorothioate linkage
  modified_base 21: mod_base = OTHER; note = 2'-O-methyl modified nucleoside
aagaaaagcagaacgntgatt

SEQ ID NO: 3317 - RNA, 21 nt, synthetic construct
  source 1..21: mol_type = other RNA
  misc_feature 1: note = ETL20 moiety
  modified_base 1: mod_base = OTHER; note = 2'-O-methyl modified nucleoside
  modified_base 2: mod_base = OTHER; note = 2'-O-methyl modified nucleoside
  modified_base 3: mod_base = OTHER; note = 2'-O-methyl modified nucleoside
  modified_base 4: mod_base = OTHER; note = 2'-methoxy ethyl modified nucleoside
  modified_base 5: mod_base = OTHER; note = 2'-O-methyl modified nucleoside
  modified_base 6: mod_base = OTHER; note = 2'-O-methyl modified nucleoside
  modified_base 7: mod_base = OTHER; note = 2'-fluoro modified nucleoside
  modified_base 8: mod_base = OTHER; note = 2'-fluoro modified nucleoside
  modified_base 9: mod_base = OTHER; note = 2'-fluoro modified nucleoside
  modified_base 10: mod_base = OTHER; note = 2'-fluoro modified nucleoside
  modified_base 11: mod_base = OTHER; note = 2'-O-methyl modified nucleoside
  modified_base 12: mod_base = OTHER; note = 2'-O-methyl modified nucleoside
  modified_base 13: mod_base = OTHER; note = 2'-methoxy ethyl modified nucleoside
  modified_base 14: mod_base = OTHER; note = 2'-O-methyl modified nucleoside
  modified_base 15: mod_base = OTHER; note = 2'-O-methyl modified nucleoside
  modified_base 16: mod_base = OTHER; note = 2'-O-methyl modified nucleoside
  modified_base 17: mod_base = OTHER; note = 2'-O-methyl modified nucleoside
  modified_base 18: mod_base = OTHER; note = 2'-O-methyl modified nucleoside
  modified_base 19: mod_base = OTHER; note = 2'-O-methyl modified nucleoside with phosphorothioate linkage
  modified_base 20: mod_base = OTHER; note = 2'-O-methyl modified nucleoside with phosphorothioate linkage
  modified_base 21: mod_base = OTHER; note = 2'-O-methyl modified nucleoside
aagaaaagcagaacggtgatt

SEQ ID NO: 3318 - RNA, 21 nt, synthetic construct
  source 1..21: mol_type = other RNA
  modified_base 1: mod_base = OTHER; note = 2'-O-methyl modified nucleoside with phosphorothioate linkage
  modified_base 2: mod_base = OTHER; note = 2'-O-methyl modified nucleoside with phosphorothioate linkage
  modified_base 3: mod_base = OTHER; note = 2'-O-methyl modified nucleoside
  modified_base 4: mod_base = OTHER; note = 2'-methoxy ethyl modified nucleoside
  modified_base 5: mod_base = OTHER; note = 2'-O-methyl modified nucleoside
  modified_base 6: mod_base = OTHER; note = Adenosine attached to C16
  modified_base 7: mod_base = OTHER; note = 2'-fluoro modified nucleoside
  modified_base 8: mod_base = OTHER; note = 2'-fluoro modified nucleoside
  modified_base 9: mod_base = OTHER; note = 2'-fluoro modified nucleoside
  modified_base 10: mod_base = OTHER; note = 2'-O-methyl modified nucleoside
  modified_base 11: mod_base = OTHER; note = 2'-O-methyl modified nucleoside
  modified_base 12: mod_base = OTHER; note = 2'-O-methyl modified nucleoside
  modified_base 13: mod_base = OTHER; note = 2'-methoxy ethyl modified nucleoside
  modified_base 14: mod_base = OTHER; note = 2'-O-methyl modified nucleoside
  modified_base 15: mod_base = OTHER; note = 2'-O-methyl modified nucleoside
  modified_base 16: mod_base = OTHER; note = 2'-O-methyl modified nucleoside
  modified_base 17: mod_base = OTHER; note = 2'-O-methyl modified nucleoside
  modified_base 18: mod_base = OTHER; note = 2'-O-methyl modified nucleoside
  modified_base 19: mod_base = OTHER; note = 2'-O-methyl modified nucleoside with phosphorothioate linkage
  modified_base 20: mod_base = OTHER; note = 2'-O-methyl modified nucleoside with phosphorothioate linkage
  modified_base 21: mod_base = OTHER; note = 2'-O-methyl modified nucleoside
aagaaaagcagaacggtgatt

SEQ ID NO: 3319 - RNA, 21 nt, synthetic construct
  source 1..21: mol_type = other RNA
  modified_base 1: mod_base = OTHER; note = 2'-O-methyl modified nucleoside with phosphorothioate linkage
  modified_base 2: mod_base = OTHER; note = 2'-fluoro modified nucleoside with phosphorothioate linkage
  modified_base 3: mod_base = OTHER; note = 2'-O-methyl modified nucleoside
  modified_base 4: mod_base = OTHER; note = 2'-O-methyl modified nucleoside
  modified_base 5: mod_base = OTHER; note = 2'-O-methyl modified nucleoside
  modified_base 6: mod_base = OTHER; note = 2'-fluoro modified nucleoside
  modified_base 7: mod_base = OTHER; note = 2'-O-methyl modified nucleoside
  modified_base 8: mod_base = OTHER; note = 2'-fluoro modified nucleoside
  modified_base 9: mod_base = OTHER; note = 2'-O-methyl modified nucleoside
  modified_base 10: mod_base = OTHER; note = 2'-fluoro modified nucleoside
  modified_base 11: mod_base = OTHER; note = 2'-O-methyl modified nucleoside
  modified_base 12: mod_base = OTHER; note = 2'-fluoro modified nucleoside
  modified_base 13: mod_base = OTHER; note = 2'-O-methyl modified nucleoside
  modified_base 14: mod_base = OTHER; note = 2'-fluoro modified nucleoside
  modified_base 15: mod_base = OTHER; note = 2'-O-methyl modified nucleoside
  modified_base 16: mod_base = OTHER; note = 2'-fluoro modified nucleoside
  modified_base 17: mod_base = OTHER; note = 2'-O-methyl modified nucleoside
  modified_base 18: mod_base = OTHER; note = 2'-fluoro modified nucleoside
  modified_base 19: mod_base = OTHER; note = 2'-O-methyl modified nucleoside with phosphorothioate linkage
  modified_base 20: mod_base = OTHER; note = 2'-O-methyl modified nucleoside with phosphorothioate linkage
  modified_base 21: mod_base = OTHER; note = 2'-O-methyl modified nucleoside
tcaccgttctgcttttctttt

SEQ ID NO: 3320 - RNA, 21 nt, synthetic construct
  source 1..21: mol_type = other RNA
  modified_base 1: mod_base = OTHER; note = 2'-O-methyl modified nucleoside with phosphorothioate linkage
  modified_base 2: mod_base = OTHER; note = 2'-fluoro modified nucleoside with phosphorothioate linkage
  modified_base 3: mod_base = OTHER; note = 2'-O-methyl modified nucleoside
  modified_base 4: mod_base = OTHER; note = 2'-O-methyl modified nucleoside
  modified_base 5: mod_base = OTHER; note = 2'-O-methyl modified nucleoside
  modified_base 6: mod_base = OTHER; note = 2'-fluoro modified nucleoside
  modified_base 7: mod_base = OTHER; note = 2'-O-methyl modified nucleoside
  modified_base 8: mod_base = OTHER; note = 2'-fluoro modified nucleoside
  modified_base 9: mod_base = OTHER; note = 2'-O-methyl modified nucleoside
  modified_base 10: mod_base = OTHER; note = 2'-fluoro modified nucleoside
  modified_base 11: mod_base = OTHER; note = 2'-O-methyl modified nucleoside
  modified_base 12: mod_base = OTHER; note = 2'-O-methyl modified nucleoside
  modified_base 13: mod_base = OTHER; note = 2'-O-methyl modified nucleoside
  modified_base 14: mod_base = OTHER; note = 2'-fluoro modified nucleoside
  modified_base 15: mod_base = OTHER; note = 2'-O-methyl modified nucleoside
  modified_base 16: mod_base = OTHER; note = 2'-fluoro modified nucleoside
  modified_base 17: mod_base = OTHER; note = 2'-O-methyl modified nucleoside
  modified_base 18: mod_base = OTHER; note = 2'-fluoro modified nucleoside
  modified_base 19: mod_base = OTHER; note = 2'-O-methyl modified nucleoside with phosphorothioate linkage
  modified_base 20: mod_base = OTHER; note = 2'-O-methyl modified nucleoside with phosphorothioate linkage
  modified_base 21: mod_base = OTHER; note = 2'-O-methyl modified nucleoside
tcaccgttctgcttttctttt

SEQ ID NO: 3321 - RNA, 21 nt, synthetic construct
  source 1..21: mol_type = other RNA
  modified_base 1: mod_base = OTHER; note = 2'-O-methyl modified nucleoside with phosphorothioate linkage
  modified_base 2: mod_base = OTHER; note = 2'-fluoro modified nucleoside with phosphorothioate linkage
  modified_base 3: mod_base = OTHER; note = 2'-O-methyl modified nucleoside
  modified_base 4: mod_base = OTHER; note = 2'-O-methyl modified nucleoside
  modified_base 5: mod_base = OTHER; note = 2'-O-methyl modified nucleoside
  modified_base 6: mod_base = OTHER; note = 2'-fluoro modified nucleoside
  modified_base 7: mod_base = OTHER; note = 2'-O-methyl modified nucleoside
  modified_base 8: mod_base = OTHER; note = 2'-fluoro modified nucleoside
  modified_base 9: mod_base = OTHER; note = 2'-O-methyl modified nucleoside
  modified_base 10: mod_base = OTHER; note = 2'-O-methyl modified nucleoside
  modified_base 11: mod_base = OTHER; note = 2'-O-methyl modified nucleoside
  modified_base 12: mod_base = OTHER; note = 2'-fluoro modified nucleoside
  modified_base 13: mod_base = OTHER; note = 2'-O-methyl modified nucleoside
  modified_base 14: mod_base = OTHER; note = 2'-fluoro modified nucleoside
  modified_base 15: mod_base = OTHER; note = 2'-O-methyl modified nucleoside
  modified_base 16: mod_base = OTHER; note = 2'-fluoro modified nucleoside
  modified_base 17: mod_base = OTHER; note = 2'-O-methyl modified nucleoside
  modified_base 18: mod_base = OTHER; note = 2'-fluoro modified nucleoside
  modified_base 19: mod_base = OTHER; note = 2'-O-methyl modified nucleoside with phosphorothioate linkage
  modified_base 20: mod_base = OTHER; note = 2'-O-methyl modified nucleoside with phosphorothioate linkage
  modified_base 21: mod_base = OTHER; note = 2'-O-methyl modified nucleoside
tcaccgttctgcttttctttt

SEQ ID NO: 3322 - RNA, 21 nt, synthetic construct
  source 1..21: mol_type = other RNA
  modified_base 1: mod_base = OTHER; note = 2'-O-methyl modified nucleoside with phosphorothioate linkage
  modified_base 2: mod_base = OTHER; note = 2'-fluoro modified nucleoside with phosphorothioate linkage
  modified_base 3: mod_base = OTHER; note = 2'-O-methyl modified nucleoside
  modified_base 4: mod_base = OTHER; note = 2'-fluoro modified nucleoside
  modified_base 5: mod_base = OTHER; note = 2'-O-methyl modified nucleoside
  modified_base 6: mod_base = OTHER; note = 2'-O-methyl modified nucleoside
  modified_base 7: mod_base = OTHER; note = 2'-fluoro modified nucleoside
  modified_base 8: mod_base = OTHER; note = 2'-O-methyl modified nucleoside
  modified_base 9: mod_base = OTHER; note = 2'-O-methyl modified nucleoside
  modified_base 10: mod_base = OTHER; note = 2'-fluoro modified nucleoside
  modified_base 11: mod_base = OTHER; note = 2'-O-methyl modified nucleoside
  modified_base 12: mod_base = OTHER; note = 2'-fluoro modified nucleoside
  modified_base 13: mod_base = OTHER; note = 2'-O-methyl modified nucleoside
  modified_base 14: mod_base = OTHER; note = 2'-fluoro modified nucleoside
  modified_base 15: mod_base = OTHER; note = 2'-O-methyl modified nucleoside
  modified_base 16: mod_base = OTHER; note = 2'-fluoro modified nucleoside
  modified_base 17: mod_base = OTHER; note = 2'-O-methyl modified nucleoside
  modified_base 18: mod_base = OTHER; note = 2'-fluoro modified nucleoside
  modified_base 19: mod_base = OTHER; note = 2'-O-methyl modified nucleoside with phosphorothioate linkage
  modified_base 20: mod_base = OTHER; note = 2'-O-methyl modified nucleoside with phosphorothioate linkage
  modified_base 21: mod_base = OTHER; note = 2'-O-methyl modified nucleoside
tcaccgttctgcttttctttt

SEQ ID NO: 3323 - RNA, 21 nt, synthetic construct
  source 1..21: mol_type = other RNA
  modified_base 1: mod_base = OTHER; note = 2'-O-methyl modified nucleoside with phosphorothioate linkage
  modified_base 2: mod_base = OTHER; note = 2'-fluoro modified nucleoside with phosphorothioate linkage
  modified_base 3: mod_base = OTHER; note = 2'-O-methyl modified nucleoside
  modified_base 4: mod_base = OTHER; note = 2'-O-methyl modified nucleoside
  modified_base 5: mod_base = OTHER; note = 2'-fluoro modified nucleoside
  modified_base 6: mod_base = OTHER; note = 2'-O-methyl modified nucleoside
  modified_base 7: mod_base = OTHER; note = 2'-fluoro modified nucleoside
  modified_base 8: mod_base = OTHER; note = 2'-O-methyl modified nucleoside
  modified_base 9: mod_base = OTHER; note = 2'-O-methyl modified nucleoside
  modified_base 10: mod_base = OTHER; note = 2'-fluoro modified nucleoside
  modified_base 11: mod_base = OTHER; note = 2'-O-methyl modified nucleoside
  modified_base 12: mod_base = OTHER; note = 2'-fluoro modified nucleoside
  modified_base 13: mod_base = OTHER; note = 2'-O-methyl modified nucleoside
  modified_base 14: mod_base = OTHER; note = 2'-fluoro modified nucleoside
  modified_base 15: mod_base = OTHER; note = 2'-O-methyl modified nucleoside
  modified_base 16: mod_base = OTHER; note = 2'-fluoro modified nucleoside
  modified_base 17: mod_base = OTHER; note = 2'-O-methyl modified nucleoside
  modified_base 18: mod_base = OTHER; note = 2'-fluoro modified nucleoside
  modified_base 19: mod_base = OTHER; note = 2'-O-methyl modified nucleoside with phosphorothioate linkage
  modified_base 20: mod_base = OTHER; note = 2'-O-methyl modified nucleoside with phosphorothioate linkage
  modified_base 21: mod_base = OTHER; note = 2'-O-methyl modified nucleoside
tcaccgttctgcttttctttt

SEQ ID NO: 3324 - RNA, 21 nt, synthetic construct
  source 1..21: mol_type = other RNA
  modified_base 1: mod_base = OTHER; note = 2'-O-methyl modified nucleoside with phosphorothioate linkage
  modified_base 2: mod_base = OTHER; note = 2'-fluoro modified nucleoside with phosphorothioate linkage
  modified_base 3: mod_base = OTHER; note = 2'-O-methyl modified nucleoside
  modified_base 4: mod_base = OTHER; note = 2'-O-methyl modified nucleoside
  modified_base 5: mod_base = OTHER; note = 2'-fluoro modified nucleoside
  modified_base 6: mod_base = OTHER; note = 2'-O-methyl modified nucleoside
  modified_base 7: mod_base = OTHER; note = 2'-fluoro modified nucleoside
  modified_base 8: mod_base = OTHER; note = 2'-O-methyl modified nucleoside
  modified_base 9: mod_base = OTHER; note = 2'-fluoro modified nucleoside
  modified_base 10: mod_base = OTHER; note = 2'-O-methyl modified nucleoside
  modified_base 11: mod_base = OTHER; note = 2'-O-methyl modified nucleoside
  modified_base 12: mod_base = OTHER; note = 2'-O-methyl modified nucleoside
  modified_base 13: mod_base = OTHER; note = 2'-O-methyl modified nucleoside
  modified_base 14: mod_base = OTHER; note = 2'-fluoro modified nucleoside
  modified_base 15: mod_base = OTHER; note = 2'-O-methyl modified nucleoside
  modified_base 16: mod_base = OTHER; note = 2'-fluoro modified nucleoside
  modified_base 17: mod_base = OTHER; note = 2'-O-methyl modified nucleoside
  modified_base 18: mod_base = OTHER; note = 2'-fluoro modified nucleoside
  modified_base 19: mod_base = OTHER; note = 2'-O-methyl modified nucleoside with phosphorothioate linkage
  modified_base 20: mod_base = OTHER; note = 2'-O-methyl modified nucleoside with phosphorothioate linkage
  modified_base 21: mod_base = OTHER; note = 2'-O-methyl modified nucleoside
tcaccgttctgcttttctttt

SEQ ID NO: 3325 - RNA, 21 nt, synthetic construct
  source 1..21: mol_type = other RNA
  modified_base 1: mod_base = OTHER; note = 2'-O-methyl modified nucleoside with phosphorothioate linkage
  modified_base 2: mod_base = OTHER; note = 2'-fluoro modified nucleoside with phosphorothioate linkage
  modified_base 3: mod_base = OTHER; note = 2'-O-methyl modified nucleoside
  modified_base 4: mod_base = OTHER; note = 2'-O-methyl modified nucleoside
  modified_base 5: mod_base = OTHER; note = 2'-fluoro modified nucleoside
  modified_base 6: mod_base = OTHER; note = 2'-O-methyl modified nucleoside
  modified_base 7: mod_base = OTHER; note = 2'-fluoro modified nucleoside
  modified_base 8: mod_base = OTHER; note = 2'-O-methyl modified nucleoside
  modified_base 9: mod_base = OTHER; note = 2'-O-methyl modified nucleoside
  modified_base 10: mod_base = OTHER; note = 2'-fluoro modified nucleoside
  modified_base 11: mod_base = OTHER; note = 2'-O-methyl modified nucleoside
  modified_base 12: mod_base = OTHER; note = 2'-O-methyl modified nucleoside
  modified_base 13: mod_base = OTHER; note = 2'-O-methyl modified nucleoside
  modified_base 14: mod_base = OTHER; note = 2'-fluoro modified nucleoside
  modified_base 15: mod_base = OTHER; note = 2'-O-methyl modified nucleoside
  modified_base 16: mod_base = OTHER; note = 2'-fluoro modified nucleoside
  modified_base 17: mod_base = OTHER; note = 2'-O-methyl modified nucleoside
  modified_base 18: mod_base = OTHER; note = 2'-fluoro modified nucleoside
  modified_base 19: mod_base = OTHER; note = 2'-O-methyl modified nucleoside with phosphorothioate linkage
  modified_base 20: mod_base = OTHER; note = 2'-O-methyl modified nucleoside with phosphorothioate linkage
  modified_base 21: mod_base = OTHER; note = 2'-O-methyl modified nucleoside
tcaccgttctgcttttctttt

SEQ ID NO: 3326 - RNA, 21 nt, synthetic construct
  source 1..21: mol_type = other RNA
  modified_base 1: mod_base = OTHER; note = 2'-O-methyl modified nucleoside with phosphorothioate linkage
  modified_base 2: mod_base = OTHER; note = 2'-fluoro modified nucleoside with phosphorothioate linkage
  modified_base 3: mod_base = OTHER; note = 2'-O-methyl modified nucleoside
  modified_base 4: mod_base = OTHER; note = 2'-O-methyl modified nucleoside
  modified_base 5: mod_base = OTHER; note = 2'-fluoro modified nucleoside
  modified_base 6: mod_base = OTHER; note = 2'-O-methyl modified nucleoside
  modified_base 7: mod_base = OTHER; note = 2'-fluoro modified nucleoside
  modified_base 8: mod_base = OTHER; note = 2'-O-methyl modified nucleoside
  modified_base 9: mod_base = OTHER; note = 2'-O-methyl modified nucleoside
  modified_base 10: mod_base = OTHER; note = 2'-fluoro modified nucleoside
  modified_base 11: mod_base = OTHER; note = 2'-O-methyl modified nucleoside
  modified_base 12: mod_base = OTHER; note = 2'-O-methyl modified nucleoside
  modified_base 13: mod_base = OTHER; note = 2'-O-methyl modified nucleoside
  modified_base 14: mod_base = OTHER; note = 2'-fluoro modified nucleoside
  modified_base 15: mod_base = OTHER; note = 2'-O-methyl modified nucleoside
  modified_base 16: mod_base = OTHER; note = 2'-fluoro modified nucleoside
  modified_base 17: mod_base = OTHER; note = 2'-O-methyl modified nucleoside
  modified_base 18: mod_base = OTHER; note = 2'-O-methyl modified nucleoside
  modified_base 19: mod_base = OTHER; note = 2'-O-methyl modified nucleoside with phosphorothioate linkage
  modified_base 20: mod_base = OTHER; note = 2'-O-methyl modified nucleoside with phosphorothioate linkage
  modified_base 21: mod_base = OTHER; note = 2'-O-methyl modified nucleoside
tcaccgttctgcttttctttt

SEQ ID NO: 3327 - RNA, 21 nt, synthetic construct
  source 1..21: mol_type = other RNA
  modified_base 1: mod_base = OTHER; note = 2'-O-methyl modified nucleoside with phosphorothioate linkage
  modified_base 2: mod_base = OTHER; note = 2'-fluoro modified nucleoside with phosphorothioate linkage
  modified_base 3: mod_base = OTHER; note = 2'-O-methyl modified nucleoside
  modified_base 4: mod_base = OTHER; note = 2'-O-methyl modified nucleoside
  modified_base 5: mod_base = OTHER; note = 2'-O-methyl modified nucleoside
  modified_base 6: mod_base = OTHER; note = 2'-fluoro modified nucleoside
  modified_base 7: mod_base = OTHER; note = 2'-O-methyl modified nucleoside
  modified_base 8: mod_base = OTHER; note = 2'-fluoro modified nucleoside
  modified_base 9: mod_base = OTHER; note = 2'-O-methyl modified nucleoside
  modified_base 10: mod_base = OTHER; note = 2'-fluoro modified nucleoside
  modified_base 11: mod_base = OTHER; note = 2'-O-methyl modified nucleoside
  modified_base 12: mod_base = OTHER; note = 2'-fluoro modified nucleoside
  modified_base 13: mod_base = OTHER; note = 2'-O-methyl modified nucleoside
  modified_base 14: mod_base = OTHER; note = 2'-fluoro modified nucleoside
  modified_base 15: mod_base = OTHER; note = 2'-O-methyl modified nucleoside
  modified_base 16: mod_base = OTHER; note = 2'-fluoro modified nucleoside
  modified_base 17: mod_base = OTHER; note = 2'-O-methyl modified nucleoside
  modified_base 18: mod_base = OTHER; note = 2'-O-methyl modified nucleoside
  modified_base 19: mod_base = OTHER; note = 2'-O-methyl modified nucleoside with phosphorothioate linkage
  modified_base 20: mod_base = OTHER; note = 2'-O-methyl modified nucleoside with phosphorothioate linkage
  modified_base 21: mod_base = OTHER; note = 2'-O-methyl modified nucleoside
ttgagttcacctttgtagatt

SEQ ID NO: 3328 - RNA, 21 nt, synthetic construct
  source 1..21: mol_type = other RNA
  modified_base 1: mod_base = OTHER; note = 2'-O-methyl modified nucleoside with phosphorothioate linkage
  modified_base 2: mod_base = OTHER; note = 2'-fluoro modified nucleoside with phosphorothioate linkage
  modified_base 3: mod_base = OTHER; note = 2'-O-methyl modified nucleoside
  modified_base 4: mod_base = OTHER; note = 2'-O-methyl modified nucleoside
  modified_base 5: mod_base = OTHER; note = 2'-fluoro modified nucleoside
  modified_base 6: mod_base = OTHER; note = 2'-O-methyl modified nucleoside
  modified_base 7: mod_base = OTHER; note = 2'-fluoro modified nucleoside
  modified_base 8: mod_base = OTHER; note = 2'-O-methyl modified nucleoside
  modified_base 9: mod_base = OTHER; note = 2'-O-methyl modified nucleoside
  modified_base 10: mod_base = OTHER; note = 2'-fluoro modified nucleoside
  modified_base 11: mod_base = OTHER; note = 2'-O-methyl modified nucleoside
  modified_base 12: mod_base = OTHER; note = 2'-fluoro modified nucleoside
  modified_base 13: mod_base = OTHER; note = 2'-O-methyl modified nucleoside
  modified_base 14: mod_base = OTHER; note = 2'-fluoro modified nucleoside
  modified_base 15: mod_base = OTHER; note = 2'-O-methyl modified nucleoside
  modified_base 16: mod_base = OTHER; note = 2'-fluoro modified nucleoside
  modified_base 17: mod_base = OTHER; note = 2'-O-methyl modified nucleoside
  modified_base 18: mod_base = OTHER; note = 2'-O-methyl modified nucleoside
  modified_base 19: mod_base = OTHER; note = 2'-O-methyl modified nucleoside with phosphorothioate linkage
  modified_base 20: mod_base = OTHER; note = 2'-O-methyl modified nucleoside with phosphorothioate linkage
  modified_base 21: mod_base = OTHER; note = 2'-O-methyl modified nucleoside
taccgttctgcttttcttctt

SEQ ID NO: 3329 - RNA, 21 nt, synthetic construct
  source 1..21: mol_type = other RNA
  modified_base 1: mod_base = OTHER; note = 2'-O-methyl modified nucleoside with phosphorothioate linkage
  modified_base 2: mod_base = OTHER; note = 2'-fluoro modified nucleoside with phosphorothioate linkage
  modified_base 3: mod_base = OTHER; note = 2'-O-methyl modified nucleoside
  modified_base 4: mod_base = OTHER; note = 2'-O-methyl modified nucleoside
  modified_base 5: mod_base = OTHER; note = 2'-O-methyl modified nucleoside
  modified_base 6: mod_base = OTHER; note = 2'-fluoro modified nucleoside
  modified_base 7: mod_base = OTHER; note = 2'-fluoro modified nucleoside
  modified_base 8: mod_base = OTHER; note = 2'-O-methyl modified nucleoside
  modified_base 9: mod_base = OTHER; note = 2'-O-methyl modified nucleoside
  modified_base 10: mod_base = OTHER; note = 2'-fluoro modified nucleoside
  modified_base 11: mod_base = OTHER; note = 2'-O-methyl modified nucleoside
  modified_base 12: mod_base = OTHER; note = 2'-fluoro modified nucleoside
  modified_base 13: mod_base = OTHER; note = 2'-O-methyl modified nucleoside
  modified_base 14: mod_base = OTHER; note = 2'-fluoro modified nucleoside
  modified_base 15: mod_base = OTHER; note = 2'-O-methyl modified nucleoside
  modified_base 16: mod_base = OTHER; note = 2'-fluoro modified nucleoside
  modified_base 17: mod_base = OTHER; note = 2'-O-methyl modified nucleoside
  modified_base 18: mod_base = OTHER; note = 2'-O-methyl modified nucleoside
  modified_base 19: mod_base = OTHER; note = 2'-O-methyl modified nucleoside with phosphorothioate linkage
  modified_base 20: mod_base = OTHER; note = 2'-O-methyl modified nucleoside with phosphorothioate linkage
  modified_base 21: mod_base = OTHER; note = 2'-O-methyl modified nucleoside
taccgttctgcttttcttctt

SEQ ID NO: 3330 - RNA, 21 nt, synthetic construct
  source 1..21: mol_type = other RNA
  modified_base 1: mod_base = OTHER; note = 2'-O-methyl modified nucleoside with phosphorothioate linkage
  modified_base 2: mod_base = OTHER; note = 2'-fluoro modified nucleoside with phosphorothioate linkage
  modified_base 3: mod_base = OTHER; note = 2'-O-methyl modified nucleoside
  modified_base 4: mod_base = OTHER; note = 2'-O-methyl modified nucleoside
  modified_base 5: mod_base = OTHER; note = 2'-fluoro modified nucleoside
  modified_base 6: mod_base = OTHER; note = 2'-O-methyl modified nucleoside
  modified_base 7: mod_base = OTHER; note = 2'-fluoro modified nucleoside
  modified_base 8: mod_base = OTHER; note = 2'-fluoro modified nucleoside
  modified_base 9: mod_base = OTHER; note = 2'-O-methyl modified nucleoside
  modified_base 10: mod_base = OTHER; note = 2'-fluoro modified nucleoside
  modified_base 11: mod_base = OTHER; note = 2'-O-methyl modified nucleoside
  modified_base 12: mod_base = OTHER; note = 2'-O-methyl modified nucleoside
  modified_base 13: mod_base = OTHER; note = 2'-O-methyl modified nucleoside
  modified_base 14: mod_base = OTHER; note = 2'-fluoro modified nucleoside
  modified_base 15: mod_base = OTHER; note = 2'-O-methyl modified nucleoside
  modified_base 16: mod_base = OTHER; note = 2'-fluoro modified nucleoside
  modified_base 17: mod_base = OTHER; note = 2'-O-methyl modified nucleoside
  modified_base 18: mod_base = OTHER; note = 2'-O-methyl modified nucleoside
  modified_base 19: mod_base = OTHER; note = 2'-O-methyl modified nucleoside with phosphorothioate linkage
  modified_base 20: mod_base = OTHER; note = 2'-O-methyl modified nucleoside with phosphorothioate linkage
  modified_base 21: mod_base = OTHER; note = 2'-O-methyl modified nucleoside
taccgttctgcttttcttctt

SEQ ID NO: 3331 - RNA, 21 nt, synthetic construct
  source 1..21: mol_type = other RNA
  modified_base 1: mod_base = OTHER; note = 2'-O-methyl modified nucleoside with phosphorothioate linkage
  modified_base 2: mod_base = OTHER; note = 2'-fluoro modified nucleoside with phosphorothioate linkage
  modified_base 3: mod_base = OTHER; note = 2'-O-methyl modified nucleoside
  modified_base 4: mod_base = OTHER; note = 2'-O-methyl modified nucleoside
  modified_base 5: mod_base = OTHER; note = 2'-fluoro modified nucleoside
  modified_base 6: mod_base = OTHER; note = 2'-O-methyl modified nucleoside
  modified_base 7: mod_base = OTHER; note = 2'-fluoro modified nucleoside
  modified_base 8: mod_base = OTHER; note = 2'-fluoro modified nucleoside
  modified_base 9: mod_base = OTHER; note = 2'-O-methyl modified nucleoside
  modified_base 10: mod_base = OTHER; note = 2'-O-methyl modified nucleoside
  modified_base 11: mod_base = OTHER; note = 2'-O-methyl modified nucleoside
  modified_base 12: mod_base = OTHER; note = 2'-fluoro modified nucleoside
  modified_base 13: mod_base = OTHER; note = 2'-O-methyl modified nucleoside
  modified_base 14: mod_base = OTHER; note = 2'-fluoro modified nucleoside
  modified_base 15: mod_base = OTHER; note = 2'-O-methyl modified nucleoside
  modified_base 16: mod_base = OTHER; note = 2'-fluoro modified nucleoside
  modified_base 17: mod_base = OTHER; note = 2'-O-methyl modified nucleoside
  modified_base 18: mod_base = OTHER; note = 2'-O-methyl modified nucleoside
  modified_base 19: mod_base = OTHER; note = 2'-O-methyl modified nucleoside with phosphorothioate linkage
  modified_base 20: mod_base = OTHER; note = 2'-O-methyl modified nucleoside with phosphorothioate linkage
  modified_base 21: mod_base = OTHER; note = 2'-O-methyl modified nucleoside
taccgttctgcttttcttctt

SEQ ID NO: 3332 - RNA, 21 nt, synthetic construct
  source 1..21: mol_type = other RNA
  modified_base 1: mod_base = OTHER; note = 2'-O-methyl modified nucleoside with phosphorothioate linkage
  modified_base 2: mod_base = OTHER; note = 2'-fluoro modified nucleoside with phosphorothioate linkage
  modified_base 3: mod_base = OTHER; note = 2'-O-methyl modified nucleoside
  modified_base 4: mod_base = OTHER; note = 2'-O-methyl modified nucleoside
  modified_base 5: mod_base = OTHER; note = 2'-O-methyl modified nucleoside
  modified_base 6: mod_base = OTHER; note = 2'-fluoro modified nucleoside
  modified_base 7: mod_base = OTHER; note = 2'-fluoro modified nucleoside
  modified_base 8: mod_base = OTHER; note = 2'-O-methyl modified nucleoside
  modified_base 9: mod_base = OTHER; note = 2'-O-methyl modified nucleoside
  modified_base 10: mod_base = OTHER; note = 2'-fluoro modified nucleoside
  modified_base 11: mod_base = OTHER; note = 2'-O-methyl modified nucleoside
  modified_base 12: mod_base = OTHER; note = 2'-O-methyl modified nucleoside
  modified_base 13: mod_base = OTHER; note = 2'-O-methyl modified nucleoside
  modified_base 14: mod_base = OTHER; note = 2'-fluoro modified nucleoside
  modified_base 15: mod_base = OTHER; note = 2'-O-methyl modified nucleoside
  modified_base 16: mod_base = OTHER; note = 2'-fluoro modified nucleoside
  modified_base 17: mod_base = OTHER; note = 2'-O-methyl modified nucleoside
  modified_base 18: mod_base = OTHER; note = 2'-O-methyl modified nucleoside
  modified_base 19: mod_base = OTHER; note = 2'-O-methyl modified nucleoside with phosphorothioate linkage
  modified_base 20: mod_base = OTHER; note = 2'-O-methyl modified nucleoside with phosphorothioate linkage
  modified_base 21: mod_base = OTHER; note = 2'-O-methyl modified nucleoside
tcaccgttctgcttttctttt

SEQ ID NO: 3333 - RNA, 21 nt, synthetic construct
  source 1..21: mol_type = other RNA
  modified_base 1: mod_base = OTHER; note = 2'-O-methyl modified nucleoside with phosphorothioate linkage
  modified_base 2: mod_base = OTHER; note = 2'-fluoro modified nucleoside with phosphorothioate linkage
  modified_base 3: mod_base = OTHER; note = 2'-O-methyl modified nucleoside
  modified_base 4: mod_base = OTHER; note = 2'-O-methyl modified nucleoside
  modified_base 5: mod_base = OTHER; note = 2'-O-methyl modified nucleoside
  modified_base 6: mod_base = OTHER; note = 2'-O-methyl modified nucleoside
  modified_base 7: mod_base = OTHER; note = 2'-fluoro modified nucleoside
  modified_base 8: mod_base = OTHER; note = 2'-fluoro modified nucleoside
  modified_base 9: mod_base = OTHER; note = 2'-O-methyl modified nucleoside
  modified_base 10: mod_base = OTHER; note = 2'-fluoro modified nucleoside
  modified_base 11: mod_base = OTHER; note = 2'-O-methyl modified nucleoside
  modified_base 12: mod_base = OTHER; note = 2'-O-methyl modified nucleoside
  modified_base 13: mod_base = OTHER; note = 2'-O-methyl modified nucleoside
  modified_base 14: mod_base = OTHER; note = 2'-fluoro modified nucleoside
  modified_base 15: mod_base = OTHER; note = 2'-O-methyl modified nucleoside
  modified_base 16: mod_base = OTHER; note = 2'-fluoro modified nucleoside
  modified_base 17: mod_base = OTHER; note = 2'-O-methyl modified nucleoside
  modified_base 18: mod_base = OTHER; note = 2'-O-methyl modified nucleoside
  modified_base 19: mod_base = OTHER; note = 2'-O-methyl modified nucleoside with phosphorothioate linkage
  modified_base 20: mod_base = OTHER; note = 2'-O-methyl modified nucleoside with phosphorothioate linkage
  modified_base 21: mod_base = OTHER; note = 2'-O-methyl modified nucleoside
tcaccgttctgcttttctttt

SEQ ID NO: 3334 - RNA, 21 nt, synthetic construct
  source 1..21: mol_type = other RNA
  modified_base 1: mod_base = OTHER; note = 2'-O-methyl modified nucleoside with phosphorothioate linkage
  modified_base 2: mod_base = OTHER; note = 2'-fluoro modified nucleoside with phosphorothioate linkage
  modified_base 3: mod_base = OTHER; note = 2'-O-methyl modified nucleoside
  modified_base 4: mod_base = OTHER; note = 2'-O-methyl modified nucleoside
  modified_base 5: mod_base = OTHER; note = 2'-fluoro modified nucleoside
  modified_base 6: mod_base = OTHER; note = 2'-O-methyl modified nucleoside
  modified_base 7: mod_base = OTHER; note = 2'-fluoro modified nucleoside
  modified_base 8: mod_base = OTHER; note = 2'-fluoro modified nucleoside
  modified_base 9: mod_base = OTHER; note = 2'-O-methyl modified nucleoside
  modified_base 10: mod_base = OTHER; note = 2'-fluoro modified nucleoside
  modified_base 11: mod_base = OTHER; note = 2'-O-methyl modified nucleoside
  modified_base 12: mod_base = OTHER; note = 2'-O-methyl modified nucleoside
  modified_base 13: mod_base = OTHER; note = 2'-O-methyl modified nucleoside
  modified_base 14: mod_base = OTHER; note = 2'-fluoro modified nucleoside
  modified_base 15: mod_base = OTHER; note = 2'-O-methyl modified nucleoside
  modified_base 16: mod_base = OTHER; note = 2'-fluoro modified nucleoside
  modified_base 17: mod_base = OTHER; note = 2'-O-methyl modified nucleoside
  modified_base 18: mod_base = OTHER; note = 2'-O-methyl modified nucleoside
  modified_base 19: mod_base = OTHER; note = 2'-O-methyl modified nucleoside with phosphorothioate linkage
  modified_base 20: mod_base = OTHER; note = 2'-O-methyl modified nucleoside with phosphorothioate linkage
  modified_base 21: mod_base = OTHER; note = 2'-O-methyl modified nucleoside
tcaccgttctgcttttctttt

SEQ ID NO: 3335 - RNA, 21 nt, synthetic construct
  source 1..21: mol_type = other RNA
  modified_base 1: mod_base = OTHER; note = 2'-O-methyl modified nucleoside with phosphorothioate linkage
  modified_base 2: mod_base = OTHER; note = 2'-fluoro modified nucleoside with phosphorothioate linkage
  modified_base 3: mod_base = OTHER; note = 2'-O-methyl modified nucleoside
  modified_base 4: mod_base = OTHER; note = 2'-O-methyl modified nucleoside
  modified_base 5: mod_base = OTHER; note = 2'-fluoro modified nucleoside
  modified_base 6: mod_base = OTHER; note = 2'-O-methyl modified nucleoside
  modified_base 7: mod_base = OTHER; note = Unlocked nucleic acid
  modified_base 8: mod_base = OTHER; note = 2'-O-methyl modified nucleoside
  modified_base 9: mod_base = OTHER; note = 2'-O-methyl modified nucleoside
  modified_base 10: mod_base = OTHER; note = 2'-fluoro modified nucleoside
  modified_base 11: mod_base = OTHER; note = 2'-O-methyl modified nucleoside
  modified_base 12: mod_base = OTHER; note = 2'-O-methyl modified nucleoside
  modified_base 13: mod_base = OTHER; note = 2'-O-methyl modified nucleoside
  modified_base 14: mod_base = OTHER; note = 2'-fluoro modified nucleoside
  modified_base 15: mod_base = OTHER; note = 2'-O-methyl modified nucleoside
  modified_base 16: mod_base = OTHER; note = 2'-fluoro modified nucleoside
  modified_base 17: mod_base = OTHER; note = 2'-O-methyl modified nucleoside
  modified_base 18: mod_base = OTHER; note = 2'-O-methyl modified nucleoside
  modified_base 19: mod_base = OTHER; note = 2'-O-methyl modified nucleoside with phosphorothioate linkage
  modified_base 20: mod_base = OTHER; note = 2'-O-methyl modified nucleoside with phosphorothioate linkage
  modified_base 21: mod_base = OTHER; note = 2'-O-methyl modified nucleoside
tcaccgttctgcttttctttt

SEQ ID NO: 3336 - RNA, 21 nt, synthetic construct
  source 1..21: mol_type = other RNA
  modified_base 1: mod_base = OTHER; note = 2'-O-methyl modified nucleoside with phosphorothioate linkage
  modified_base 2: mod_base = OTHER; note = 2'-fluoro modified nucleoside with phosphorothioate linkage
  modified_base 3: mod_base = OTHER; note = 2'-O-methyl modified nucleoside
  modified_base 4: mod_base = OTHER; note = 2'-O-methyl modified nucleoside
  modified_base 5: mod_base = OTHER; note = 2'-fluoro modified nucleoside
  modified_base 6: mod_base = OTHER; note = Unlocked nucleic acid
  modified_base 7: mod_base = OTHER; note = 2'-fluoro modified nucleoside
  modified_base 8: mod_base = OTHER; note = 2'-O-methyl modified nucleoside
  modified_base 9: mod_base = OTHER; note = 2'-O-methyl modified nucleoside
  modified_base 10: mod_base = OTHER; note = 2'-fluoro modified nucleoside
  modified_base 11: mod_base = OTHER; note = 2'-O-methyl modified nucleoside
  modified_base 12: mod_base = OTHER; note = 2'-O-methyl modified nucleoside
  modified_base 13: mod_base = OTHER; note = 2'-O-methyl modified nucleoside
  modified_base 14: mod_base = OTHER; note = 2'-fluoro modified nucleoside
  modified_base 15: mod_base = OTHER; note = 2'-O-methyl modified nucleoside
  modified_base 16: mod_base = OTHER; note = 2'-fluoro modified nucleoside
  modified_base 17: mod_base = OTHER; note = 2'-O-methyl modified nucleoside
  modified_base 18: mod_base = OTHER; note = 2'-O-methyl modified nucleoside
  modified_base 19: mod_base = OTHER; note = 2'-O-methyl modified nucleoside with phosphorothioate linkage
  modified_base 20: mod_base = OTHER; note = 2'-O-methyl modified nucleoside with phosphorothioate linkage
  modified_base 21: mod_base = OTHER; note = 2'-O-methyl modified nucleoside
tcaccgttctgcttttctttt

SEQ ID NO: 3337 - RNA, 21 nt, synthetic construct
  source 1..21: mol_type = other RNA
  misc_feature 1: note = 5VP moiety
  modified_base 1: mod_base = OTHER; note = 2'-O-methyl modified nucleoside with phosphorothioate linkage
  modified_base 2: mod_base = OTHER; note = 2'-fluoro modified nucleoside with phosphorothioate linkage
  modified_base 3: mod_base = OTHER; note = 2'-O-methyl modified nucleoside
  modified_base 4: mod_base = OTHER; note = 2'-O-methyl modified nucleoside
  modified_base 5: mod_base = OTHER; note = 2'-fluoro modified nucleoside
  modified_base 6: mod_base = OTHER; note = 2'-O-methyl modified nucleoside
  modified_base 7: mod_base = OTHER; note = 2'-fluoro modified nucleoside
  modified_base 8: mod_base = OTHER; note = 2'-O-methyl modified nucleoside
  modified_base 9: mod_base = OTHER; note = 2'-O-methyl modified nucleoside
  modified_base 10: mod_base = OTHER; note = 2'-fluoro modified nucleoside
  modified_base 11: mod_base = OTHER; note = 2'-O-methyl modified nucleoside
  modified_base 12: mod_base = OTHER; note = 2'-O-methyl modified nucleoside
  modified_base 13: mod_base = OTHER; note = 2'-O-methyl modified nucleoside
  modified_base 14: mod_base = OTHER; note = 2'-fluoro modified nucleoside
  modified_base 15: mod_base = OTHER; note = 2'-O-methyl modified nucleoside
  modified_base 16: mod_base = OTHER; note = 2'-fluoro modified nucleoside
  modified_base 17: mod_base = OTHER; note = 2'-O-methyl modified nucleoside
  modified_base 18: mod_base = OTHER; note = 2'-O-methyl modified nucleoside
  modified_base 19: mod_base = OTHER; note = 2'-O-methyl modified nucleoside with phosphorothioate linkage
  modified_base 20: mod_base = OTHER; note = 2'-O-methyl modified nucleoside with phosphorothioate linkage
  modified_base 21: mod_base = OTHER; note = 2'-O-methyl modified nucleoside
tcaccgttctgcttttctttt

SEQ ID NO: 3338 - RNA, 21 nt, synthetic construct
  source 1..21: mol_type = other RNA
gtttaaagttgcctaagaatt

SEQ ID NO: 3339 - RNA, 21 nt, synthetic construct
  source 1..21: mol_type = other RNA
  misc_feature 1: note = ETL20 moiety
  modified_base 1: mod_base = OTHER; note = 2'-O-methyl modified nucleoside
  modified_base 2: mod_base = OTHER; note = 2'-O-methyl modified nucleoside
  modified_base 3: mod_base = OTHER; note = 2'-O-methyl modified nucleoside
  modified_base 4: mod_base = OTHER; note = 2'-methoxy ethyl modified nucleoside
  modified_base 5: mod_base = OTHER; note = 2'-O-methyl modified nucleoside
  modified_base 6: mod_base = OTHER; note = 2'-fluoro modified nucleoside
  modified_base 7: mod_base = OTHER; note = 2'-fluoro modified nucleoside
  modified_base 8: mod_base = OTHER; note = 2'-fluoro modified nucleoside
  modified_base 9: mod_base = OTHER; note = 2'-fluoro modified nucleoside
  modified_base 10: mod_base = OTHER; note = 2'-O-methyl modified nucleoside
  modified_base 11: mod_base = OTHER; note = 2'-O-methyl modified nucleoside
  modified_base 12: mod_base = OTHER; note = 2'-O-methyl modified nucleoside
  modified_base 13: mod_base = OTHER; note = 2'-methoxy ethyl modified nucleoside
  modified_base 14: mod_base = OTHER; note = 2'-O-methyl modified nucleoside
  modified_base 15: mod_base = OTHER; note = 2'-O-methyl modified nucleoside
  modified_base 16: mod_base = OTHER; note = 2'-O-methyl modified nucleoside
  modified_base 17: mod_base = OTHER; note = 2'-O-methyl modified nucleoside
  modified_base 18: mod_base = OTHER; note = 2'-O-methyl modified nucleoside
  modified_base 19: mod_base = OTHER; note = 2'-O-methyl modified nucleoside with phosphorothioate linkage
  modified_base 20: mod_base = OTHER; note = 2'-O-methyl modified nucleoside with phosphorothioate linkage
  modified_base 21: mod_base = OTHER; note = 2'-O-methyl modified nucleoside
gaagaaaagcagaacggtatt

SEQ ID NO: 3340 - RNA, 21 nt, synthetic construct
  source 1..21: mol_type = other RNA
  misc_feature 1: note = 5VP moiety
  modified_base 1: mod_base = OTHER; note = 2'-O-methyl modified nucleoside with phosphorothioate linkage
  modified_base 2: mod_base = OTHER; note = 2'-fluoro modified nucleoside with phosphorothioate linkage
  modified_base 3: mod_base = OTHER; note = 2'-O-methyl modified nucleoside
  modified_base 4: mod_base = OTHER; note = 2'-O-methyl modified nucleoside
  modified_base 5: mod_base = OTHER; note = 2'-fluoro modified nucleoside
  modified_base 6: mod_base = OTHER; note = 2'-O-methyl modified nucleoside
  modified_base 7: mod_base = OTHER; note = 2'-fluoro modified nucleoside
  modified_base 8: mod_base = OTHER; note = 2'-O-methyl modified nucleoside
  modified_base 9: mod_base = OTHER; note = 2'-O-methyl modified nucleoside
  modified_base 10: mod_base = OTHER; note = 2'-fluoro modified nucleoside
  modified_base 11: mod_base = OTHER; note = 2'-O-methyl modified nucleoside
  modified_base 12: mod_base = OTHER; note = 2'-fluoro modified nucleoside
  modified_base 13: mod_base = OTHER; note = 2'-O-methyl modified nucleoside
  modified_base 14: mod_base = OTHER; note = 2'-fluoro modified nucleoside
  modified_base 15: mod_base = OTHER; note = 2'-O-methyl modified nucleoside
  modified_base 16: mod_base = OTHER; note = 2'-fluoro modified nucleoside
  modified_base 17: mod_base = OTHER; note = 2'-O-methyl modified nucleoside
  modified_base 18: mod_base = OTHER; note = 2'-O-methyl modified nucleoside
  modified_base 19: mod_base = OTHER; note = 2'-O-methyl modified nucleoside with phosphorothioate linkage
  modified_base 20: mod_base = OTHER; note = 2'-O-methyl modified nucleoside with phosphorothioate linkage
  modified_base 21: mod_base = OTHER; note = 2'-O-methyl modified nucleoside
taccgttctgcttttcttctt
